United States Patent Application Publication US 2025/0051766 A1 - sequence listing, part 5

SEQ ID NO: 5065 - DNA, 58617616 bp, Homo sapiens (residues 6,513,070-8,684,092 of 58,617,616)
  source 1..58617616: mol_type = genomic DNA
ggagctggcagtgagcccagatggcaccactgcactccagcctgggtgatagagagagattccgtctcaaaaaaaaaaaaaaaaaaagacacacacacacacacacacacacacacacacacacacacacacacacaatgagatacacacagatacatagccctagaatcagaccccaggacagacatagccagactattttcatttttttatttttttagtatttattgatcatttttgggtgtttctcggagagggggatttggcagggtcataggacaatagtggagggaaggtcagcagataaacatgtgaacaaaggtctctggttttcctaggcagaggaccctgcggccttccgcagtgtttgtgtccctgggtatttgagattagggagtggtgacgactcttaaggagcatgctgccttcaagcatctgtttaacaaagcacatcttgcaccgcccttaatccatttaaccctgagtggacacagcacatgtttcagagagcacggggttgggggtaaggttatagattaacagcatcccaaggcagaaaaatttttcttagtacagaacaaaatggagtctcctaagacatagccagactattatacatggttataaacacaacacacgtcgggcgtggtggctcacgactgtaatcccagcactttgggaggccaaggtgagtggatcacctgaggtcaggagttcgagaccagcctggccaacatggtgaaaccctgtctctactaaaaatacaaaaattagccgggggtggtggtgtgcgcctgtgatcccagctactcgggaggcggaggcaggagaatcacttaaacccaggaagcggaggttgcagtgagccaagattgtgccattgcactccagcctgggtgacagagcaagactctgtctccataaaaaaccccaaaaaacaaaaaacacaatacagacttgggtacacacatactacatacatgcaatcaaacatacacagagatatgcaatgtatctgcacagccctacagacagacctggagacacaactcaaaaaaaaaaaaaaaaaaaaaagccagcgcacagacccagggagctgacaacacacgggcatacacgctgggtgctttggacacaaaagccacaccgtagggagttttttctctcattcactcaaacacacattgacccagacgcccccacacaaggacacacacggatggacatacacacgaccgcagtccacaagccagggcagactgccatcccccaagtccagcgaccctcagataaagacagacaagcagactgaccccaacatagtcccttgaatttcaggctgggggtgctcaaggctggtatggaggggctcacccagcatcagatagaaaaagtcagaagcatccaacattttttttttgagacagagtctcgctctgttgcccaggctggaatgcagtggcaccatctcggctcactgcaacctccacctcctgcgttcaagcaattctcctgcctccagagtagttgggattacaggtgctggccaccatgcctgactaattttttcacatttttagtacagacgaggttttaccatgttggccaggctggtctcgaactcctgacctcaggcgatctgcctgcctcagcctcccagaatgctgggattacaggtgtgagccactgcgcccggccttttttctttttttttttgagatggattttcacttttgctgcccaggctggtgtacaatggcgtgatcttggctcactgcaacctctgcctcccgggttcaagcgattcttctgcctcagcctcctgagtagctgggattacaggcatgtgccaccacggccagctaacttttttgtagttctagtagagacagttttcaccacgttagccaggctggtctggaactcctgacctcaggtgatccacccgcctcggcctccaaaagtgcttggattacaggcgtgagccactgtgtccagccgcatccaacatcttggtggtgccggagttctggtgacagtggagtggctggggggcatcctgtgccagtccccaggccactggtgctgagaaaggattcctgctggggtggggccatcaccccacgtggtgaccttttccacgtcaggggagcagagggctttgggatgggttcacccactcagaccaggcctcatggaggaagggtggggtggagaaaccaaggcctccgtagctcctgttagtgatttaagacacagcccccaccccacaccaggggcgtggcaggtctggggtggggtcttggtggatgtacatgcggattatgggtgagggcagagcctgcatgtttggagggcagaacgaatggggcaaggcctaaaggaatcaaagggcggctgcaagtcccagcgaaattggtgagggatgagcatggcttgaaaacctggagtgggaagagggtgcaggactccggaagggcagaacccagaaaaggggctaggggttgagacaggacaaaccctcaaagggggagaggtgccgagcctgaggagagggtggtatggactaagaaaagcagaaaagtgccaggcgcggtggctcacacctgtaatcccacaactttgggaggccaaggtgagtgaatcacctgaggtcaggagttcgagaccagcctgaccaacatggtgaaaccctgtccttactaataatacaataaaaaaaaaaaattagacgggcgtggtggtgcatgtctgtaatcccagctactcgggagcctgaggcaggaggatcacttgaacccgggagtcggaggttgcagtgagccgagatcgcaccattgcactgcagcctggacgacaagagcaaaactccgtctccaaaaaaaaaaaaaaaaaaaaaagcagaaaacagagtggggcacgaagagtctccaggccctattcccaggtcactaatgattgggaaatgggcggggcctgggagaatgacagggaggtgtgagggactgaggagtgggcagggtctgggaggctgataacaggggaagtgggcggggcctggagataatattgggaggaactgtggcgtgggaagggcctggagcggacagcaggggaagtgggcggggcctggggagaatgacagggaagtgggagggactaaggagttagcaagggctgggagacaaataactatgaagtgggcggagtctagggagaatgaccgtggggtaggggaactgaggagtgggctgggcctgggagtctgctggggaagcggacggtcctcgagagaatgacaggaaagtgggaaggactgaggagtgggcagagcctgagaggcaaacggatgggtacgagggcggggcctggggagaagctagggaggtgggaggcggatgacagcggaatggggcttcggtagactgacaggatcagtcgtggaaggggcgggcccatctttctcttgaacccgcgagccaaagccacgttggtgctggtgatcatccaggctgagcgctgggcattcccagtctcgggcgatttcttggcgttacttccaggctgagagccatgactaggcgagcttcggccgtgggaccgaagacctcccaccctcagcactctaacctccccgaccctgccctcgctgtgcctcgttgggaatccgcctccggggtcttccgcggtccaggagccgcacctgccgggtggagacgcggggctggctggggtgcgggagtaggaggtcttcggtccaaccgcctccaacccattcctgcttccgacgttctgttcccgcgcttaatgccctgcccgatccagttccggcctcccatctccccttcccgcgtctccacgctctttccttccccggttctgccgtgaatgctcccaagtcctagagcaccggaactccccgcgcgccttggctcctgggccccagctccgtgcagtcctggactggggctccaggtccaccagggggcgcccgctgcccaagctgggtatcgctgcggagaaaaggggcccagagtgattgttcctcaggggagggagggggaggtccccagagggaagggcctgagtttcctcttgggggatggatcctaggtggtctgaggggtgagtcctgggttccctggcgggagtggatcttgggtggtcctctgtgggtacagggtggaacttgggtgttctgaggggtagtccctggggactcctctgggagcggggcagaccttggatggtcgtaggattggacctggacctctgtgtgtgtgattgtgcatgcccataacgtgtgttcttgcgttatgtctatgactagccatggtgcctgccatgtatgtgtatctacgattgtgtctttgggtgtctgtctcagtgtgtaaccgtgtacgtgtgtgttgtgtacctccatgtctgttttggtatgtgtgtgatggtgtgtctgtgttggtgtgttctagtctcggtgtgtttggttatatgccctgaatatatgtctcttgtgtccttgtgtgtgtctgttgctagctttttttttttttttgaggcagaatcttactctgtcatccaggctggagtacagcggcgccatcttggctcactgcaacctctgcctcccgggttcaagcgagtctcccatctcagcctccttagtagctgggactacaggcactcaccaccacgcccggctattttttttttttttttttttttgtatttttggtagagacagggtttcaccatgttggccaggttggtctcggactcctgacctcaagtgatctgactgccttggcatcccaaggtgctgggattacaggcgtgagacactgcacccggtctgtggctagctttgatggttgttgtgtatctatgattgtgtgtccaggtgtgtgtgtgtgtgtgtgattgtgtgtatgtctgcatggtgtgtctgtatgtctgtcttgttttgtgtgattgtatatgtccagaatgggtgtgccctttgtgttctggtgtctgtgtgtgtctacttgtgtccctcccccaggggagttggaaagtcctttccaggtagttaccctgctgggattccctttccaaagcgggttgacttcccagcaccgtgagctgcctcttcatgctcttggaaggggtcgctgggtctgccccaagtctgcctgggtcttccccaaccctgactcctccttccactgccctcaacagggaaacaccatttcctgcctttgatgtcactaggtacaaaaagtttccttcctccaagtggctctggccactggtttctttctgcgtgtgtgaaagctggccacgattctgtgcttaatgttaaaacaaaaagaataaaacaaagcaaacaaaacgaacccatggaaaatgcaagcatgcaaaatcatacaccatgaaacatccacatcttctcaccccaataccctcaatttttgcacatctttctgaaatgttttatacaaacctatttctgctctgaaacccaaagcgtgcattctgcacatagcagcctgcaccttgctttcgtttctttttttcctcacttggttattcttttaaaggtttttttttgttcccccgagacagaatctcactctgttgcctaggctggagtgcagtggcatgatgatctcggctcactgcagcctctgcctcctgggttcaagtgattctcctgcctcagcctcctgagtagctgggattacaggcatgcgccaccacacctgactaatttttgtatttttagtcgagatggggtttccccatgttggccaggctggtttcgaactcctgacctcgtgatccacctgcctggacctcccaaagtgcagggattacaggcgtgagccaccatgcccagcctctttttttttttttttttttttgagatggagtctcactctgttgtcaggctggagggcagtggtgtgatctcggctcactgcaacctccacctccccggtttaagcgattctcctgccgcagcctcccgagtagctgggactacaggggcccgacaccacgcccagctaatttttgtatttttagtggagacggggtttcattatgttggccaggatggtctcgatctcttgacttcgtatctgcccgcccccgcctcccaaagtgctgggattacaggtgtgaagcaccgcacccggccgcctagccccctttaaaggttttgtaaaccatctgcccaaaaaagcaattacatagaataatcacgccaaattttcaacctaaagttcaaacaggacagagactcaacctgatgggtaaggcccatttcacactaaaaaccttaatctttgaaagagtagaggaggcaaagtctgagtgccttgttctcttagcccttggagatctctgtcaagagatgactcagacatgtttttaatttttaaaccgattctgtgagtaataacctggcagttttccttctgatgaccaatgcagttattttcatcttcaacaattttgcaccacatattcctgcctgccccttgtttttatttatttatttttgtttttttgtttattttgttttgttttgagactgagtctctctctgtcacccaggctggagtgcagtggcatgatctcagctcactgcaacctctgcctcccgggttcaagcgattctcgtgcctcagccttccgtgtagctgggattacaggcgcccaccaccatgcccagctaatttttgttgtatttttagtagagacaaggtttcaccatgttagccaggctggcatgacccactgcacctggccttttttttttttagacaagtcttgccctgtcacccaggctggagtgcaatggcgtgacctcagctcactgcaacttccaccttccgggtttaagggattctcctgcctcagactcccgagtaactggcattacaggtgtggaccaccacgcctggctaatttttgtatttttagtagagacggggtctcactatattgcccaggctagttttgaactcctgagctcaagtgattcgcccccctcagcctcccaaagtgctgggattacaggtgtgagcccccggccatgccttcctttttgcccaaacaagatcaacccatgtacacagtcacgtggaggcaccacactctcagcccactggcagcaatgatggctggtcctattgagcacctgctgtatgccaggcactattctggctccctgattctggacaacagtcccacaaggtggtcactggtgttagtctcatttcatatacggggaaactgaggcacagagagatggagagatttcaaggtcatgtagccagcagaggcagagctgggatttgaagccaagtgagtcaaatcctatgctctggtgctgctcaactggaaacacatcgatgcccgcatgcatcctcctgagtacacagtatcacatcagagacactcagtcccagagtagcaggatgtgtgcctcaacttcacaaagctcacttgctgtgcacaatcataccttgcaagctgggagtggtggttcctgcctctaatcccagcaccctgggaggctgagacgggaggatctcttgaggaaatgctgtggtcgtttcctcaacttcaggagttccagaccagtctaagcgagaatgtaccttgcaactcttttttttttttttttttttttgagacggagttttgctctgatgcccaggctggagtgcagtggcacaatctcggctcactgcaacctctgcctcgtgggttcaagtgattcacctgcctcagcctcccaagtagctgggatgacaggcgcccgccactgcgcccagctaatttttttgtatttttagtagagacgggggtttcaccatgttggccaggccagtctcgaactcctgacctcaggtgatctgcctgcctaggcctcccaaagtgctgggattacaggcgtgagccaccatgcctggcctgtaccttgcaactcttacacaaaaccccaggtgcacacactcgggtgccagtctgtgttttccagagacctggatgtagcttttccagctactcgactcatttggatgatgtaattcccctctctgtgtctcttttctcctcaacatgtgtaaacactcctttatggctctagatcaatctcaggctgggtgttcatgcctgtaatcccagcatttttgggaggccaaggcaggaggatcacttgagttcaggagttggagaccagcctggggaatatagcgagaccccgtctttaaaaaaaaaaaaaaaaaaaaaaaaaaaaaggcctggtgctgtggctcatgcctgtaatcccagcactttgggaggccgaggcgggaagatcacgaggtcaggagaccagcctggctaacatagtggatccctgtctctactaaaaatacaaaaaattagctgggcgtggtggtgggtgcctgtaatcccagctgcttgggaggctgaggcaggagaatcgtttgaagctgggaggcggaggttgcagcgagttgagatcacgccactgcactccagcccgggcgacagtgcgagactccatctcaaaaaaaaaaaaaaaaaaaaaaaaatagcagggtatggtagtgtgcacctgtagtcccagctattaatacatgggaggctggggcaggaggattggttgagcccaggagttccagaccagcctgggcaacatagtgagaccccatctctacaagaaataataataagaataataaaatagctgagtgtggtggcacgtgcctgtagtcccagctactcaggagactgaggtgggaggatcacttgagcctgggagttcaaggctgcagtgagtcatgattatgccactgtactccagcctggccaatagagcgagaccgtgtctcaaaaaacaataagatgcacttcactccacactttcctttcctcttttcttcagttccatctggcccctagctcactccgtagctgtctgactcatgcaaattgctccgctcacaccactaatgctctgttaggcttcactctgccctggggtagatagaggacccaggccaggtaaaagttaaccctcgaagaggtcactggctacatgatgggagacacactacaaggaccctgagaggagaagattgttgctgggaaacaatcaaggtggacttcctgggggaggagtctgttcactcaacctcagaggcagaagaaggagggcccccctggcacagcctggggtgctgtcccttccaactacttcctgtgcaatccctccctcaaggcctgtgatggtgagggtggagagtgaggcccttccccagtgggtgaggaaaaccagggcccacgcttacttcgaggagacagctgagcacagaggtgtgactccagcaaacgtgaggtgctaagagggtgacgttgagtgctccacggtgggcggggccgcctggctcagatgtcccgaccacagtgcgtcacggcgctccctgactgcggcctgagtcttccccaggcgttgaggtcttgtttcccttccctggggggcatgttcagagctccgccaagccccccagcacagataggagttcagaccagtcacagtgagaccttggccaagagacctcactttctggagttttaatttctgtgcccacgttttagggatgatgttgtaccacagagctgtagagaaacgtcagtgaccatcacaatgacaggttgcctttattgaacatttactatgtgctcggcacggtgctcagagcaagctttccactattctttgagatccactatgattcccatttaacacatctgaacaatgagctgaatcagagaagtgaagcagcttgcccaagatcacacagcaaaaactcccactctttctctctcttttttttttcttttttttttttgagacagagtcttgctctgttgtccaggctggagtgcagtggcacaatccccactcactgcaacctctgcctcccgcattcaagcgattctcctgcctcagccccccaagtaactgggattacaggcatgtgccaccatgcccaactaattttttgtatttttagtagagacgggatttcaccatgttaatcaggctggtctcgaactcccgatctcaggtgatccacctgcctcagcctcccaaagtgctgggattacaggcatgagccaccatgcccagcctgtctttctttttttatttttgtttttattttaaagacaaggtcttgctcttttttgcccaggctggagtgcagtggtatgaccacagctcactggaacctctgcctccccaggtcaagcgatcctcccacctcagcctctctgagtagctgggaccacaggtgtgtgccatgacacctggctaattacttttctttttttttttttgagatggagtcttgctctgttgcccaggctggagtgcagtggcgtgatcttggctcaccacaacctctgcctcccgggttcaggagattctcctgccttagtccgccaagtagctgggactacaggtgtgtgccaccatgcctggctgatttttgtgtttttagtagagatggggtttcagtatgttggcccggccttgttttttttttcttgtagagatgggatcttgctatactgcccaggctggtcttgaactcctgggttcaagcgatcctcctaccttggattcccaaagtgttcggattacaggcatgagccactgtgcccatcccacacagccagaactctgaagagctggaattgaagactccacaggcagcaaacatttttctgaaaaggaccagacagtaaatattttgggctttgtgagctagtcagtcccttttcacaactcttcaactccaccatagtgtcaggaaagccaccatagacaatacggaatgaagggaggatcacttgagcctgggagttcgaatgaatgaaggccaggtgcggtggctcaggcctgtaatcccagcactttgggaggccaaagaggtggatcaggaggtcaggagatcaaaaccggcctggccaagacggtgtaaaccctgtctctactaaaaacataaaaattaggcatggatgcgggtgcctgtaatgccagctactcaggaggctaaggcagagaattgcttgaacctgggaggcagagttttcagtgagccgagatcatgccatggcactccagcctgggcgacagggcgagactccatctcaaaacaaaaacaaaaacaaaaacaaaaccagaaaagacaatatggaatgaatgagtgtggctgtgtgccaggcacactttatttatggacagtaaatgggaaagtcatatcatttgcacatgtcaggaaatgttatttttcttttgacatttttccagacattcaaaaacaaaaacaattaagtgaaaggatcttcatctacaaggctgtacaaaaactggcagtgggccatatttagcttttggctggagtttgctgatcctggctctagagtgttcttaacctttatgctataattatttctcttttcattttttttttttttttttttgagatagggtctcactctgtcacccagcctggagtgcagtggtgcgatcctagctcactgcagccgcaaccttctggtttcaagtgatcttccaactcagcctcctaagtagctgggactacaggcatgagccaccatgcccagtggcatcaggatctttaaatctttttaaaattaattaagttttttttttttttgagacagagccttgctctgttgcccaggctggcgagcagtggtgtgatctcggctcactgcaacctccgcctcccaggttcaagcgattctcctgcctcagcctcccgagtagctgggattacaggcatgcaccaccacacccatctaatttttgtatttttagtagagacggggtttcaccatgttggccaggctgctctcgaactcctggccttaagtgatcctcctgcctcggcctcccaatgtgtagggattacacgcgtgagccatcacgcccggcctagagtgctcttaacctttatgctatatttctttctcttttcctttttttatttattttatttattttttaaagataggatctcgctctgttgcccaggctggagtgcagtggtacaatcatacctcactgcagccttgacctcctgggctcaagcagtcctcccacctcagcttcttgagtagctgggaatacaggcatgaggcaccatgctcagcgacatcagtatctttaaatctttattcctggcctggtgcagtggctcatgtgtgtaatcccagcattctgggaggctgaggcgggtggatcacttgaggttaggagttcaagaccagcctggccaacatggagaaaccttgtctctactaaaaggaggcagaggttgcagtgagccgagatggtgccactgcactctggcctggatgacggagcaaaactgtctcaagaaaaaaaaaaatctttattcctggttggtcagcttccttggagagcgaccttctacctatgcatcttctggatcctggatgtggagggagtagaggcaagcgctgagggcatgtgtgtgtcttaatttcaacattcacattccaggttcaatgaacactcctgtttcccactacctgccatttttttttctctttccagaaaccctgccattttcctttctctctctttttttttttttttttttttgctttttttttgagatggagtttcactcttgtcgcccaggttggagtgcaaaggtgcgatcttggctcactgcaacctctgcctcccgggttcaagcaattctcctgcctcagcctcctgagtagctgggattacaggtatgtgccaccatgctggctaacttttttttgtatttttagtagaggcggggtttcaccatgttggccaggctggtcttgaactcctaacctcaggtgattcactcacctccgcctcccaaagtgctgggatgacaggtgtgagccaccgcgcccagcccgttttcctttctgctttttttttttttttttttttttggaaacggagtcttgctctgtcgccaggctggagtgcagtggggtgatctcggcttactgcaatctccgcctcctgggttccagcgattctcctgcttcagcctcccgagtggctgggactacagtgcgcaccaccacgcccatgtaattttttgtatttttagtagagacgggtttcaccatgttggccaggatggtctcgatctcttgaccttgtgatccacctgccttggcctcccaaagtgctgggattacaggtttgagccaccgccccggccattcctttctcttaagggaaaaaaaaaaaaaaaaaaaaaaggctgcacgccgtggctcacacctgtaatcccagtactttcggaggccagggcaggaggacccattcagcccaggagttagagaccagccagggcaacatggagagactccgtctcaattaacatataaaataaaatatcctgtgtgcattcacttaggaaaaaatgcaataaaataaaataaaaaataagaatgaaaaaggacctggcgactcagcagcccaccgaggtagctcacgcctataatcccagcactttgtgaggtcgagatgagcggatcacttgagccaaggaggtggactgggcaatatggtgaaaccccatctcttcaaataatactaaattagctgagcattgtggtgcgcacctatagtcctagctactggggaagctgaggtgagaggattgcttgagcctggcggttgaggttgctgtaagctgtcattacccactgcactccagcctcggtgacagtgtgaaatcctgcctcaaaaaaataaaaattacttagaaagggccaggtgaggtggctcatacctgtagtcccagcactttggggagtctgaggtgggagagtcacttaagcccaggagtttgaggttgcaatgaaccacgatgacaccactgcactccagcctgggcaacagagtgagatgctgtctattttttttttttttgagacggagtcttgctctgtcacccaggctggagtgcagtggtacaatcttggctcactgtgacctccacctcccagattcaagtgatcctcccgcctcagcctcccaagtagctggaactacaagctagtgccaccatgcccagctaatttttgtagtttttttttttttagtagagacagggcttcaccatgttgcccaggctggttttgaactcctgaacttaagtgatccacccgcctcagcctcccaaagtgctgggattacagacgtgagccaccatgctgggctgagaacctatcttaaaacaaaaaattgcttctctgattctctcttatggaaagtggagaggagttggtgtcccttctgcaatttttttttttttttgagatagagtctcactttgtcacccaggctggagtgcagtggcacgatctcggctcactgcaacctccgcctcccgggttcaaggattctcttgcctcaacctcccgagtaactgggattataggcatctgccatcacgcctggctaattttagtatttttagtagagatggggttcaccatgttagtcaggctggtcttgaactcctgacctcaggtgatccacctgcctcagcctcccagagtgctgggattacaggcgtgagccactgcgcccggccttcttctgcaaatttatctatggcaaacttctgtattttagccgccatccaccacattattcatagttgaggggattcaccaacgagtaggtcttaggggtggtggaaatctaaggaaactcacctttccgttctgctggcttgtaattttttttttttggtttacgaacaattgctcaagtgtgactacagtgaagtttcaggagacagtgaaaacagaggctggttcagtttgtcatcttgacccggaagggatggtgtaaagggagacatgagtggtgagaaagtgtctggcagttgcggttctggggaaagaatgttccaggccgaggaatagcagatgcgaaggaaaaacgtgggcacaagtggcattctcaaacttgcggggccgtcggaatcttctggaggacaccccctctgagagtttccggaggtttaggcggggtgctagaatttgcatagctaattgatagtggccctgttgctgggtcgggcctcacacgtggagtacccaaaccgtatataggaagtgtttagcatttggtaatgctccttcaacactagccagtaacattactgttttctctgcaatcccccagggaggcccaatacaggatcagacacagtgctgacctggaagatacttgttctgttgaatgagaagtctaccttatgactgggcacggtaacgcatgactggcatcacagtgctgagaggccaagacaggagcattgcttgagtccaggagtttgagaccagctgagcaacatagcaagaccctgtctctataaaaagtaaaaaattaaaaaaaaaaattggtaggcatggtggtatgtgcctgtagttccagctattcaggagtctaagacaggaggatggcttgaacccaggattggaggctgcagtgggctatgatcgtgccactgcactccagcttgggcgacagagcaagaccttgtatctgaaagcaaaacaaaagtccctttattttatgggctgttgacttctgctagcagagggatgaaaggcgtggtctaccctcccatctcccatggggctgggagatgggaagggagttggccattgtggacccacactggtctgggcagaccaggacttcaacaccagccaagggctttccccgggtcacgtccctctccatctgggagtgcttcctcttttggggccaagttttcaccgcttcttggcccatcctcccagccccggattggccgcctccagcaggccagagcagatgggaaatgtgtttcctccaactcgctcaacactgtccctttcttgcaaggggaatttctccacctggactctccgagcttctgcttgtagggtcccgaggggctcctgccgggaaccatccagtgggtgggtgggggcaggccagggaaggcccaggggtcccggggaaggtggccaggagggctgagcatgacactcagggttccactggggggttggggatcagggggcagatgctccaggagtgagggtggttgaggcttggctgaagcctgacccttcttaggaagtgctggatgtgggggaacccgggggagtcctagtgatggggggctagggggtgctgagaggaggggaaggagacaaagagagactaaagaaggaaaaggagagagacagggagagacagagagtcagagagagacagagggaatcagagacagagagaaacagggagagagacagaaagagtgagagccagagacatacagagacagggagagacacagagatgcataaagagagggagtcagagatggagagagacagagataacggagccagagatagggagagtcagagacagagagaaagaaacacacagactgacacagataaaagagccagagacagggagaggcagagacaaagagagatacagagacagagataacagagccagagacagagagacagagacagagataacagagccagagacagggagagagtgtcagagacagagacagacacagagataacagagccagagatagggagagtcagagacagagagaaagagacacaagacagacatagataaaagagccagagacagggagaggcagagacaaagagagatacagagacagagatagcagagccagagacagggagagagtgtcagagacagagagacagacacagagataacagagccagagatagggagagtcagagacagagagaaagagacagacagacatagataaaagagccagagacagggagagagacacagagacagagacatagagacagagataacagagccagagacagagtcagagacagagacagagagagccagacacagagacagagagagagagtcacagccagagacagcgacagagataacagaagcagagagagggagaaagataacagagccagagacagtcagagacagagatagagagacagagataacagagccagagacagatacagagacagagataacggagccagagatagggagagagagtcagagacagagagagatatatagacagagataacagagccagacatggggagagagagtcagaggcagagagagagaagacagatagagagacagagccagtgataacagagccagagacagggagagagagtcagagagagatacaatgagagacagagataacagccagagacagagttagacagagagatacagagacagagataacagagccagagacagggagagagaattagagacagagatagagagagacagagacagagataatacaggcacagaggcacgcatagacataaattggcagagagagagaaagatctctttccacccactgcagaggcaatcaacagagacagagaaagacgttaacggggagacacagagagcaaaggagactgagtcagcaagagacccacagagataccgggaaagagcggcagagagggagaaccagggcgatggagagacagcagggagaaaggaacctggagccgagcttggaaggccggaaacggaaaggagagcgaaaagcggagagagatccgagtggagaaaattccgcagagtcacggggacgaggggaaaggctctgggctgggaaggggcgtggccgcgggcggaggggcgtggccgcgggcggaggggcgtggcctccttttgtagccaagcagctataaaaagcggcgcgctgtgtcttcccgcagtctctcgtcatggaatacgcctctgacgcttcactggaccccgaagccccgtggcctcccgcgccccgcgctcgcgcctgccgcgtactgccttgggccctggtcgcggggctgctgctgctgctgctgctcgctgccgcctgcgccgtcttcctcgcctgcccctgggccgtgtccggggctcgcgcctcgcccggctccgcggccagcccgagactccgcgagggtcccgagctttcgcccgacgatcccgccggcctcttggacctgcggcaggtgagacgtgccccgaccctcggtagctggtctcgcgggagacccctaccgcccctctgggactcccttctccctcccgcacccccagggacacctgttctacactcccggccggggagaggagacccaccggggctcccattctccatctagcaccgaggccgggggggcacacctttcatcccgcacccctacgacacctcatctgtaccccaggccgggggcggggaggagaccgcccaacagttctttttggaccccccaagggtctccttcttctagtccggggggcacccctttcatcctgcgcccgctacgagaccctatctgtatcccgggagggggagaggagacccccacaagttctttttggacctccaagggctctccttctccgtcttgcacgggagggcacccctttcattccgcatcccgagaccccatcagcaccccaggccaggaggaggagacccccacagtcctcaacccctcagggatacgtcttctgcaccccgggtcggagaaaggctggcttccctccatgtggcagtgggtgggggcacccctcttcattccgcattcccaaggcaccccatctgcaccctggacgggggaccctccgcggttctccaaccctcgacggcttcctttctctatgtaggacttaggacattgagggcacctctttttaccccgcacccccacaagctctgcatctctggggggaaccttttttccatccccgatccgaggggggcacttcctctttatctgggaccgccaaggagacccccagttcctttgctaactcccaaagagccttatccccaacatctgaggtacccctctccctttcaagacccccaggggaatacccccaagggggctggaaagaagagggatcgcttttccctcctgaattcttggagatctgtccttggggcaggttgagccaccagcttcgtgtgtgtgtgtgtgtgtgtgtgtgtgtgtgttcgtgtttgtgtgggtgtttgtgttcgtgtgtgtgtgttcgtgtgggggtgcgtatgtgtgtgtgttcgtgggtgtgtttgtgttcgtgtgggtgtgtgttcgtgtgggtgtttgtgtttgttcgttcgtgtgggtgtttgtgttcatgtgggtgtgtttggatatttgtgttcgtgtgtgtctgtgtgtgttcgtgtgggtgtttgtgtgtgtttgtgtttgcgttcgtgtgtgtgttcgtgtttgttcgtgtgtctgtgtgttaatgtgggtgttcgtgtgtgtgttcgtttgtgtttgtgttcgtgtgtttgtgtgtttgtgtgtgtgtgtgtgcggtctctgttctttagttgggagggaagggaagcgtaggcttcaggtcggcacagactctggggaccctgacagctgaagtgagtggggacagaacctccattttctaggggaacccccatccactttcctcctttctacttttaacagggcatgtttgcgcagctggtggcccaaaatggtaagtatcctccgccacttccggtccctggccccccaccatccccaccccgggatacgaagaagggggaacctggagagtgaggctctgccgcacactggctttgacccttgaccgctgctgtctctgaaagctgctacttcccctctttgaacgccaccgatccctctttctgacttgctctgactctctggatgccatggcctccccatcagacccccatctgggcccacctgggacccctgccctctcagagctggggcttgacacccccaacccccagcctggttttgtgtctctggcctccttcttttcgaaaccctcttccccgctgcttttcttccctctttcctgccccttccccactctcccagcctctcttccctacctcttcccctcgcccagagcctcctccttactcccattctcttccccatccccaggccctcctcctgtccccttccctccccctagaccctcctccctgccccttccccaaaccctccccagccccatgctctcccagtttccaagacactcctcccagcaccttccctccccgtccagagacttcttccccgctcgagacctcttcccccttcccctcccagagacccccttcccccttcccctctccatctagagatcacttccccctttcccctccccctccagaaaccccttcccccttccctctcccctccagagaccccttccccctccaaagaccccttcccccttccttccccctccagagacccctttccccttccctccccttccagagaccccttccccctccccctccaaagaccccttcctccttcccctccctctccagagaccccttcccccttccctctccctccagagaccccttcccccttccctgccccctccagagtccccttcccctccagaggccccttcccccttccccctccccctccagagacaccttctcccttctccccctccagagaccccttcccccttccctccccctgcctaagactcccctccctgccatcttctctccttggtgcttccttctccctaacccctcccccaccccttcctgctccctttgcctttcttcgaagtcctctcttaccaggtcccctgtccacccctcttaaagttcccttgattccctgatggatccttcctctagaacttcctcctttcctaacagtcttccctctccctcctagctccctgtccacctctcctctcccctttccttccttctctcccttctcctccccccatctccatcctgtccgagatctgctgctccctccaaccccctcaccgccctctccaggagtccccttacccctccccgaggcctcttccagccagactcgcctggccttttgcttttcaccccctcttcctcttcctgcatgtctttccccgcacccgcatcactccttccccacccaacctcttggagttttgccctgtcccgactcttgtccttctccctggattcccttcctctgttctatccccgtctttccctcccctagctctacccctgctcagagtcccgcccccaacaacctcagttctcttcaatcagcacccccccaacgccccccccacccaggctccccgctctgctcccctgtcccgctccctgccccgccattccccgccccccggcccctgacccgttcttttctcccagggctgcgctgacatgttcggtgctcagccacgctcagctgtgctgggacatgctcagctaagctaagtgcatgctttcctcccacagttctgctgatcgatgggcccctgagctggtacagtgacccaggcctggcaggcgtgtccctgacggggggcctgagctacaaagaggacacgaaggagctggtggtggccaaggctggagtctactatgtcttctttcaactagagctgcggcgcgtggtggccggcgagggctcaggctccgtttcacttgcgctgcacctgcagccactgcgctctgctgctggggccgccgccctggctttgaccgtggacctgccacccgcctcctccgaggctcggaactcggccttcggtttccagggccgcttgctgcacctgagtgccggccagcgcctgggcgtccatcttcacactgaggccagggcacgccatgcctggcagcttacccagggcgccacagtcttgggactcttccgggtgacccccgaaatcccagccggactcccttcaccgaggtcggaataacgtccagcctgggtgcagcccacctggacagagtccgaatcctactccatccttcatggagacccctggtgctgggtccctgctgctttctctacctcaaggggcttggcaggggtccctgctgctgacctccccttgaggaccctcctcacccactccttccccaagttggaccttgatatttattctgagcctgagctcagataatatattatatatattatatatatatatatatttctatttaaagaggatcctgagtttgtgaatggacttttttagaggagttgttttgggggggggggggtcttcgacattgccgaggctggtcttgaactcctggacttagacgatcctcctgcctcagcctcccaagcaactgggattcatcctttctattaattcattgtacttatttgcttatttgtgtgtattgagcatctgtaatgtgccagcattgtgcccaggctagggggctatagaaacatctagaaatagactgaaagaaaatctgagttatggtaatacgtgaggaatttaaagactcatccccagcctccacctcctgtgtgatacttgggggctagcttttttctttctttcttttttttgagatggtcttgttctgtcaaccaggctagaatgcagcggtgcaatcatgagtcaatgcagcctccagcctcgacctcccgaggctcaggtgatcctcccatctcagcctctcgagtagctgggaccacagttgtgtgccaccacacttggctaactttttaatttttttgcggagacggtattgctatgttgccaaggttgtttacatgccagtacaatttataataaacactcatttttcctccctctggagagttggttgttaaattaccagcacacgctgtccgtctctgctctacagagctggccagtttcttcagccccatagtttccccaccatacagatctttcacggccacccctataactagacacatcctctggctggctaagatagccctgtgattctgcaacccagggcttaacatgtgatttgtggggagaggaggatggttccccccaattctggtccaggagccagtgtcaaatctgattagtcaaatctgattggtcaccgcctgtctggtagcgggttgtttgcctgttttgaataagacccctggcaacaggtgattcaattctctcgtcccagctgattgggtcaggttggacacgtgacttgagctgggccaatcaggtctccccagaaatgtgggtgggctggaccacagaggctagagagtggagaagaggaagttgtgcaaagactcaggtgtgaccacagagttccagagagacaccagagctactttgatttccttcttgcctcttgctggtgacatgggttgccattttaatggcaaaactgcaataacttttgcctcaacctaatagatttctagggctgccataagaaagtaccgtaaagtgggtggcttaaagcaaacgagctttgttctcgctcggttctgcaggccagagtccaaagtcaaggtcttgacagggccatgctcattctaaaggctccagggagaaggccttcgttgcctcctcctaagttctggtggttgccagcaatcctccagtctctgcctctgttggtcacatggctgtgttctttctgtgtgacttcatttctttgtctcttcttcctgtttttttctttgagatggaaggagtctcactctgtcacccaggctggagtgcagtggcgccatctcggctcactgcaacctccacctcccgggttcaatcaattctcctgcctcagtctcccgaatagctgggattacaggcacatgccaccacacccagctaatttttctattttaatagagactgggtttcaccatgttggccaggctggtcttgaacttctcctgacctcaagcgatccacctgccttggcctaccgaagtgctgggattacaagcatgagcctctatgcccggcctcttcttcctttttatgtattgttttttttgtagagacagggtcttgctatgttgcctaggctggtcttgaactccgagcaacgctcctgcctcagactcccaaagtgccaggattacaggtgtaaggcaccaggcccgaactctcccctttttataaggacaccagtcatgctggattcagggcccatcctcttccaatatgacctcatcttaatttaaataattacatctgcaaagaccctatttccaaagaaggtcattaatatagtttggctctgtgtccacacctacttttttctttttttttttgagaaagactctcatcagttgcccaggctggtgtgtagtggcgcagtcttggctcactgcaacctctgcctcttgggtttaagtgattgtcctgcctcagccccctgagtagctgggattacaggtacaggccaccactcttggctattttttttgtatttttagtggagctggggttttgccatgttggccaggctggcctcgaactcctgacctcaagtgatctgcctgccttggcctcccaaagtgatgggattacagacgtgagccaccgtgcctggcccccttggggttctgagctcccctaagctaaaatcaagttgactgaaggattgctttccttctggaggctctagaggataattgctttccttgtttttccaacttctagaggcttgtttttaatttaatttaatttaattttgtaaagacggggtctcctcatgttgcccacgctggtcttgaactcctgacctcaagggatcctcctgtcttggcctcccaaagtgttgggattacaggcgtgagccactgcacctggcaattttatttatttttttgtagagatgaggtcttgctatgttgcctaggctggtctcaaattcctgggcttgagcaatcctccaccatctgtaagaattaaagaaagaggaaagaaacatgaaaggtggcttaacagtcaaggacaggtttattttagagaaaataaacctgagaggggcttctagccgagttaggtcagaggcacactctcttacagactaggagtttttaagcatttattcagggagtttatcagaggcttggactgcttctgtgtttctttctttctttttttttttttcttagttgaagtctcactctgttgcccaggctggagtgtggtggcacaatctcagatcactggaacctctgcctccctggttcaagtaattctcctgcctcagcctacagagtagctgggactacaggcatgtgccaccacgcccagctaatttttgtggtttttttttttttttttttgagacggagtctcgctctgtcacccaggctggagtgcagtggtgtgatctcggctcactgcaagctccgcctcccgggttcatgccattctcctgcctcagcctctggagtagctgggactacaggcgcctgccaccacgcccggctaattttttttgtatttttagtagagacggagtttcactgtgttagccaggatggtctcgatctcctgacctcgtgatctgcctgcctcggcctcccaaagtgctgggataataggcgtgagccaccacgcctgccccacaaagaattacaaataaagctttcactcttcttatgtaaagacctgacaatgcatacaatggtccactgttgatttggaagcagggacagttttctattacagtctgttgattgtattgtataattgttaagggaaaaaaggaaaattatatttctgtttgtttgtttgtttgttttgagatggagtctagctctgtcacccaggttggagtgcagtggtgcgatctcagctcactgcgacctccacctccctggttcacaagcaattctcctgcctcagcctcttgagtggctggggttacagacatgcgccaccacgcccagctaatttttgcatttttagtagagacagggtttcaccatgttggctaggctggtctccaacttctgggctccagtgatccacccacttcagcctcccaaagtgctgggattacaggcgtgagccaccatgtccgcccacccccccggtatttcttattggaactgtttttcttgtttgaggtttcttttccataccctgaatctacaatgacccaaccataaccttgcttctgaggcccgttctctgatgagaaagtttagttccaaatggggaaagtacctgagttccagccttttcagcctgactttgcatctatttagagatagggtcttacaggggtgatcacgttaaaatgaggtcattagggtaagccctgatccaatatgactgatgttcttataaaaggggggctttggctggatgtgataggggggctcctgcctgtaattccagcactttgggaggccaagccaggtggattgcttgagcctagaggcttgagaccagtcatgggcaacatagcaagaccccgtctctacaaaaaatacaaaaatttgctgggtgtggtggtgcatacctgtagtcccagctgctagggaggctgagatgggagatcactagaaccttgaggtcaaggctgcagtgagctgtgattaccactgcaatccgctctgtgtgacacagcaagatcctgtctccaaaagaagtgagggtagggggtggaatttggacacagacacacacagggagagcaccacgtggagaagaaaatggaatccatggtcaggctcggtggttcatgcctgtaatcccagcactttggtggatcactggaggtcaggagtttgagatcagcctggccaacaaagcgaaacctcgtctctactaaaaatacacaagttagccgggtgtggaggcgttcacttgtcatcccagcatcccagctactccgtctcaaaaaaaaaaaaaaaaaaaaaggaaaatgtcatctacaagccaaggagagaggcctggaacagagccttcccttacagccctcagacggaaccacatctgccaatgccttggttttggacttccagcctctagaactgttagacaataaatttctgctgttgaagcccccaatatgagctactttgttataacagccatatcaatttaaaaagagaattaaaggagttgataatttttttttttttttttttttgagatggagtctcactctgtcacccaagcagactgcaatggcacgatctcagctcactgcaacctccgctcccgggctcaagcgattctcccaccttaccctcccgagtaagtagctgggtctacaggcgcatgccaccatgtctggctgatttttctatttttggtagagacagggtttagccatgttggccaggctggtcttgaactcctgacttcaagtgatccacccgcctgggtctctcaaagtgtagggattacaggcgtgagccactgcacccagccaggaattgatactttaatacactttcaatgcacagtgtctggctcctggttagcattcattaaacggtagcaattattaaggacactcaaatggacagaaagaatgttacagaaacacaatggtacaatagaggggttgcggccaggcacagtggctcacacctgtaatcccagcactttgggaggctgaggtgggtggatcacgaggtcaggagttcgagaccagcctggccaatatggtgaaaccccacctctactaaacatagaaaaattagctgggcatggtgacaggcacctgtaatcccagctactcgggaggccgaggcaggagaattgcttgaacctaggaggtggaggttgcagtgagctgagactttgccattgcaccccagcctgggtgacacagcgagactccatgtcaaaaaaaaaaaaaaaaaaaaaggctgattcaaaaagctggcaagcaaggccaataatagagagagtaaaaatactatgagagatagtgaaataagagatagtgaaaatagtatacattgagcaggatgtgttgagagatatgacagacaaggcaacacaaaggtgcattgctcaagcagtgacacacagatttacagatgacatcatacaataacagatgtgggtattagaaagaagcaacagctcacagaagagtggttaccatgacacagctgtgatgttatagagatatcgccaagctgggcatggtggtacatatctgtggctccagctacttgggaggccgaggcgggaggatctcttgagcccaggaggtcgaggctgcagtgagctgtgatcacaccattgtactctagcctgggcgacagagagacaccctgtcttaaaaaaaagaacactcttgccaagaagggagttacaaagtcataatgttataaaagcaattatgcaaggataggatattgtaaacagccacagctttataatatcatagccacgactctaacgttgccaaacagaaagacaaatactacacgatctcacttatatgcggaatctaaaatagtcaaacacatagaagcagagaatagagcggtgcttgccaggggctgtgggtggggaaaacgaaaggtgttggtcaaaggataccaacattcagttaagaaagatgaggccgagcgcagtggctcatgcctgtaatcccagcactttgggaggctgaggcggatggatcacccgagatcgggagtttgagaccagcctgaccgacatggagaaacctcatctctactaaaaagagaaaattagccgggcgtggtgctgcatgcctgtaatcccacccactcgggaggctgaggcaggagaatcacttgaactcaggaggcggaggttgcagtgagcggagatcacatcattgcacaccagcctgggcaccaagagcaaaactccatctgaaaaaagaaagaaagaaagaaagatgggctgggcgtggtggctcacgcctgtaatcccagcactttgggaggccgaggcgggtggatcatttgaggtcaggagttcaagaccagcttggctaacatggtgagaccccatctctactaaaaatacaaaaatgagccaggcgtggtggcgagtgcctgtaatcccagctacccaggaggctgaggtaggagagtcgcttgaaccttggaggtggaggttgcagtgggtcgagattacactactgcactccagcctgggagacagaacgtgactctgtctcaaaaaaaaaaaaaaaaggtgtttttattggattaataaggaacccccttcttcttcctctttttttttttaattttgagatagggtctctctctgtcactcaggctggagtgcagtggggtgatctcggctcactgcaacctctgcctcctgagttcaagtgattctcttacctcagcctcaatagtagctgggactacaggtgcacaccacatgccaggctaatttttatagtttttggtagagatgtggtttcaccatgttggccatgctggtttggaactcctaacctcaagtgatccactcgccttggcctcccatagtgctgggattacaggtgtgagccaccatgccctgccaagaacccccttcttctaccagacagaagccaaggtgcactgacttgggagcagattatgggctagatttgagccttcactcacatctgtagcccagggactaaatatatgtttatatataaatatgattgggtgtgatggctcatgcctgcaatcccagcacgttgggaggccaaggcaggaggatcacttgagcgcaggagttcaggactggcctgtgctacgtagggagaccctgtctctgcaaaaaattagctgggtgcaacggtgtgcacctgtagtcccagctacttgggaggctgaggcgggaggatcgcatgaggccaggagtttgaggctgcagtgagccatgattgcactactgcactccattctaggtgacagaaccagactctctctttctctcatcagatatatatatatatatatatatcagaggctaggaagaggggagaggggatgaggaaaaataaagaatacaaatgtatttattatcattgaactgaacccttaataatggaaaaaatggtaaatcatatatgcacattttacatatataatttaacattatatctatatataattcacatacatagtatattcatatacctaaagctggaaaaaatgctaatctcgcaagcagaaaattgactttgtcataactcctttggcagctgaacttgactgtgcccatgtaattgtattgatgatctttattcattgtataacctgcgatgaaacagggatgtttacatgagtcaagtatgcttgattatgagggggtgttccaggagcccccagagggggtaatccatgctacacatatcatactacctttctacattctaatttttttttttttttgagacagagtcttgctctgttgcccaggctggagtgcaatggtgcgatctcagctcactgcaacctccgcctcccgggttcaagagattctcctgcctcagcctcctgagtagctgggattataggcatccaccaccacgcccggctaatttttttttttttaatctttagtagagagagagtttcaccatgttggccaggctggtctcgaactcctgacctcgtgatctgcccgcctcggcctcccaaagtgctgggattacaggcgtgagccaccgcgcctggcctctaaattctagatctccaaatctggcttctagggtttgggatcagggaatgaggatttgtccaaaggcatggggtgggaaaaaagactgtttgtttacaagaggtaagatgtcaggaagcagcaatgtgcttacaccactgaggtaggtgtgcccctttcaggggggagtttccattctggggatccccattctgaggtttcccagaaggggacagttttcaagcccactttcctgacggttgcatcttgtcgcaggtttcatctcacctttgtcttgctgcccgcaatctctggcttggtcagctcaggaaacccctggtgccagagatccggatgaagatgagggactagttcggcctgttgcggtatctcagcggggtgagacgcctcggtggggaaggcagagtggaaaacccgacgccttccaccagcaactcttgtgaatatgtgtgtgttggggttatgtggctagccaggagtggagatggatagtgtggtctgcagaggatgcattttggagctgacagagctgagtttgagccctggttctgccagtgctggctaggctgtgcacccctgggcaagggtcttcacctctctgggctcatgtcttcagttataaaactggaaaataattctcatgggctcttgggagatttatttatttatttatttacagacgaattctcgctcttatcccccaggctggagtgcagtggtgcgatctcagctcactgcaacctccgcctcccaggttcaagcgattctcttgcctcagcctcccgagtagctgggattacaggcgcctgccaccacgcccggctaatttttgtgtttgtagtaaaggtgtgtttcaccatgttggccaggctggtctcgaactcctgacctcaggtgatctgcctgccatggcctcccaaattgctgggattacaggcatgaaacactgtgtccagtgctcttgggagttttaaatgagctaacagtttcaattgcacagtggctgacattggatttcatatgtgaaatctgttgttattattattaacattattattattattttttgaaacatagtttgtgatgttgctcaggctggagtgcggtggtgcgatcttggcttactgcaagctccgtctcccgggttcaagcgattctcctgcttcaccctcccaggtagctgggattacaggtgtgagccacctcacctggctcatttttgtatttttagcagtgacagggtttcaccctgttggccaggctggtctcgaactcctgacctcaggtgacctgcccgtcttggcctcccaaagttttgggattacaagcgtgagccactgtacccgacctgtttttgttttttttttttaaattttattttgagatggagtctcgctctgttgcccaggttgtagcacagtctcgctctgttgcccaggttgtagcagtggcgtgatctcggctcactgcaacctctgcctcctgggttcaagcaattctcctgcctcagcctcccgagtagctgggattacaggcacctgccaccacgctaatttttgtatttttagtagacatggcgtttcaccatgttggccaggctggtttcgaactcctgacctcaagtgatccacctgccccggcctcccaaagtgctgggatgacaggtgtgagtcactgagcccacctcaaactttgtttttcctctgctctaacaccaccaccaccaccgcaatcatcaatacagaagacttctgtgaccaaatgtgtggggtttttttccccacacacctagcagcggacaccagctgggtgtttcggggtgtcttccaattcaattccgacatcatctacgtggagatggtgtcagattgcacaggctgggggcttagtccccaggagtgacgcccacgcccctagataccagttgcaagtctgggcctttggaaggttttttatttatttatttatttattttttagatggagtcttgctctgtcaccaggctggaaagcagtggcacgatctcagctcactgcaacctctgcctcccaggttcaaacaattctcctgcctcagcctcccgagtagctgggactacaggtgcgcaccaccatgcccagctaatttttgtattttcagtagagatggggtttcaccatgtcggccaggctggtctcgatctcttgacctcatgatctgcccgcctcagcttcccaaagtgctgggattacaggtgtgcgccaccatgcccggctaatttttgtattttttagtagagatggggtttcatcacattggtcaggctggtcttgaacttctgacctcgtgatctgccggccctggcctcccaaagtgctgggatgacaggcttgagccactgtgcccagcctggagcttttgactgattggcttcaagttggggttcccacgaccccttgtttgagttggatcaatttactggggtggctcacagaactcagggaaatatttatgttcactgatttattataagtgatgttactagggatacagacgaagacatgcatggggtgaggtatgggggacgtggggtggatctttcatgccctccctggatgcaccgtcctctgggatcctcctgtattcagttaactggaagctccctgaacccagtcttttggcatttccatggagacttcattacataggcatgattgattaaaccattggccattggtgatcaacttgaccttcagcccctctctcctcctcctgaaggttgggggctggggctgaaagtctcaaccctctaatcctgccttggtctttctggtgaccagcctcaccttgaacccatcagacaaaagatatacaaaagacagcactttgaagatgccaaggattttagtagttctaagccaggaacagtggacgaaagcctgtatatataataatgccgcaaacagggtagacggtggaggcatttatggacttggggaacctggaggatcatagatcactttgaattgtgcgggatttccagatgtcgctgagggactttgaccgggatggccaagggggagtgttgaatcctttctgtagctatgcaagctctttgcctggaatgcacatttgagagttgttggtatattttatataatgcaagttttgggggcaggatgaatctcttacgcagacaaataaaggtgtagaagagaggaaggtctaagctcaagtgccaagaaactctgatacataacagaaggcatatgtatatgtattagagatgggtttcaccatgtgccaagaaactctgatatataacagaaagcctatatatgtatatatatatgagattgggtttcactgtatgtgtgtgtgtgtgtgtgtatatatgtatgcagtgtctggaagtcaggtgttcagcatatttggagatttggaggggtgaccagacaggaaagaaaaaaaataagtttcgagaaatgtgtttgaagaagtaagtggtggtcagtggtgtctaattcaacttctgagagtctgtcaggatgagaagctgaggcaggaagggaggtaggcaccatgtccggccatgaagttggcaagaatcccctgaaacaggccagggagatgaatgaagaagataaggctttgaggcaaaaacgatgtccacatctacacagtatttagctcccatttatgccaagaccagcttggttggggagaccctaagccagcggcgctagaggaattaaagacacacacacagaaatgtagaggtgtggagtgggaaatcaggggtctcacagccttcagagctgagagccttgaacagaggtttacccacgtatttactaacagcaagccagtgataagcatcgtttctatagattatagattaactaaaagtatcccttatgggaaacgaagggatgggccgaaataaaggggtgggtctggctagttatctgcagcaggagcatgtccttaaggcacagatggctcatgctattgtttgtggtttaagaacgcctttaaacggttttctgcccttaaagaacacctggtgggccaggtgttccttgccctcactccagtaaaaccacaaccttccagcatgggcgtcatggccatcatgaatatgtcacagtgctgcagagattctggctagttttggggccagtttatggccagactttgggggggcctgttcccaacacatttataagtgagagcatgcagtatttcactttctgtttatgagttgtttcacttaaaggtaatggtctccagcttcacccatgttcctgcaaaagacatgatttcattttatttatttatttattttttgagacagagtctcattttgttgcccaggctggagtgcagtgatgtggtcatagctcactgcagcctcaaactcctgggctcaagtgatcctcctgcctcagcctcctgtgtagctagggctacaagagcgagccactggggctggctaatttttaaaattaattaattacttgctgtgttgcccatgctggagtgcagaggtgtgatcacagctccctgcagccttgacctgctagtctcaaggaatcctcccacctcagccttctaggtggctggtactacaggggtgcaccaccatgcctagctaatttttgtgtgtgtgtatatatatataaaatatacatatataacatatatttatatttatatatattatatatttatatttatatattatatataaatatatatttatatttatatatatttatatatatatgtttttgtagagacagggtcttgctatgttgcccaggctggtttagaactcctgagctcaggcgatctgcctaccttggcctcccaaagtgttggaattacagttgcgagacactgcacccagcctaaatttatttttgtcttatatttctatttaatatttgaggttgaatatgatgaatagaaatacaagcgaagtaaataattttaaataataaaggcggggcatggtggctcatgcctgtaatccagcactttgggaggccaaggtggtggatcacttgaggccagaagtttgagactagcctggccaacatggtgaaatcttgtctctatcaaaaatatgaaaagtgagctgggcatggtggcacgtgcttgtagtcccagctactcaggaggttgaggcatgagaatcgcttgaacccaggaggcggagattgcagcgagccaagatggcaccaccacactccagcctgggtgacagagccagattctgtctccaaaaagaaagaataaatgtgtaaaaaagaatatttaatattatatacatttataaataaacatgttatttatattttatattatatatattttattttatttttaacttttatttttccaatatatacactttttaaaaatatgccactggcccttgagaaaaaatttatttgcactgctagcattcttctactgcagtattagcatttcatataggcactactcttccatttcctacttacattcatttgggctattgttacaaatacagtatgcaattgaagaaaactaatggggggcccagtgtggtggctcacacctgtaatcccagcacttctggaggccgaggtgggcgatcacctgaggtcaggagttggagaccagcctggccgatatggtgaaacttcttctctaaaagtacaaaacttagctgggcatgatggtgtgcacctgtagtcccagctacttgggaagctaaggcacaagaattgcttgaacctgagaggcagaggctggagtgagccgaaattgagccactgcactccagcctgggtgacagagcgagaccctgtctcaaaacaaacaaacaaacaaacaaaccaaacaccaaacaaaaaaacccaaaaaacaaactagtggggaaacgaagctttatatatgtttttcctctttacagcttctcaatatcatgccatttaagtgaaaatttatatggacattttctgtacatatcttgaagggcagagattacactgataaaaccaaaataattgtgcaaggctgggtgcagtggctcatgcctgttatcccaacactttgggaggctgaggtgggtggattacctgaggtcaggagtttgagaccagcctgggcaccatggcgaaaccctgtctctacaaaaaatataaaaattagccaggcgttggtggtgcacacctgtaatcccagctactcagaggctgaggcaggagaattgcttgaatccaggaggcagaggttgcagtgagccaagatcgtgccactgcactccagcctggtcaacagagtgagaccctgtctcaaaaaaaaaaaaaaaaaaaaaaaaaaaaaaaaaatcccaaagcatttaatttgaccaaaaacctctgtaaatagaaatactcagaatgttctttagttagctctctctcaaatatcaagggtgcactgagttcagggcagaaatcacgtgtgaattagttccaatggtatacaaacacatggaaacactaaattaaaagctgccttcctcaaagtgtagtgaggcctcaaaaccactctaactgtaacctcagtcaccaagacagaggacagactgaacatttacctctgcataacaaatgtggctctggcacacctgttatctatccaaattattaactttctttgcctttctagaaaaaggcctattattgaacattaaccatattctaattttaaatgtaattcatttcttaaaaaaaaccactgtctctgaacagataaaaatggcttacataggccaggtgcagtggctcacacctgtaatcccagcactttgggaggccaaggtgggtggattgcctgagctgaggagttcgagaccagcctgggcaacacagtgaaaccccatctctactaaaatacgaaaagctgggcatggccgcgtgtgcctgtaatcccagctattcgggaggctgaggcaggagaatcacttgaatctgggaggtggaggttgcagtgagccaagattgtgccactgcactccagcccaggcgacagagcaagactccctctcaaaaagaaaaaaaaaaaaaaaggcttacgtaatactgttacagaatctttagggtgtcacatttctggtcggaaatatctgtgtcccctggcacctttgccagagttcttgtcttgtgtccaggaagaatgagttacacagggaagtggagggtgaacaggatgaagaggagttttattgagtgttagaacagctcagagaagaccaaagtgggcagctcctctctgtagacagttcattccattgagtgctcagctctcagcagagaggagaccccagagagggtagttcctctctggtcctcctgatggctgcaggtctcagcagagaggaggccttggagagggtggcttctctctgcccagcaggtcatcccatcctcactgcagctttcagcagagagtgtagctcctttctgcagctggtcgtcaggtcatctccagctattagcacagagagtggcttctctctgcagctggtcatctggacgtctctctttttctctgccctgctctggctgagcctggggcttttatggacctcagaggggatgcagtgtgtgccgactggtccattaacagccatgcatgggcctggaaaaggcatcacaagtccccactctggtccacaggtctggtggccctcagccttcaggccctccctggcctgaaggtggggtcttagcgaggacttgctcccttctgccaggaatcagtctgcctcctgctgccgttcatggccccaggttggaccctgactttgctccaagatcagagcaggcgctgagagcagggagaaaccaggcagtgggagcaggtgctttggagcctgcaagggcaggggggcctccctggccccccaagagcacagggaggcttgaatctgcggccacaacttgggcggctgcagaggcccaggatgcagcttcaggtgctcccccttgcaagctggggcggggattcctgatccttgccgggcctgggctggcgcccagggcaggggcaatatcaccacgaactgcccctgttgccccggcactcaggggcagcctgtggggagctgatcctggccccagcctggccacggggagtggcaggcttggtggtcgctctgatgcggggtggaccccaagaacacggctggcaagccctgcacagagcctcctcctgatgcctaggaaccctgaaccctctgcggggtgggtgcagtggctgcgcggctggctagtccccaaagagggcgctgctccctcttcctgcccccgcccccaaagcacggccccagctccacatccgggcccctctctgcccgaccgcgctgctccagcagggcgtgggctccagagggctgtgggctgcgtggccggggagctgtcagcctcctccctgggccctccctgcagcagccatgtgatggcagcagccagacagcccaccacagccatcaataccacacgaattttcacaataagctggacaaactttccctggtggaaaaattagtctgtggccgggtgtggctggccctggctctcccaggaggttttcatgacgtaacctgccaatttgataaatctctgcctcatagagtcacaaacgttcttctctagatgagaagttctccatgattccataaatataaattttaaaaaatttaacctggggccgggcgcggtggctcatgcctgtaatcccagcactttgggaggcggaggtgggtggatcacctgaggtcaggagttcaagaccagcctggccaacatggtgaaacccttgtctctactaagaatacaaaaattagctgggcgtggtggtgtgtgcctgtaattccagctacccaggaggctgaggcaggagaatcgctggaacctgggatgcggaggttgcagtgagccaagatcacgccactgcactccagcctgggtgacagagcaagaccccgtctcaaaaaacaaaacaaaacaaaacaaaaaaaacaaaaactaactttaagttcaggggtacatgtgcaggtttgttatatgggtaaacctgtgtcatgcgggtttgttttacaggttatttcacccaggtgctaagcctagtatccattagctatttttcctgatcctcttcctcccccaaccctccaccgtctgataggccccagtgtgtgttgttctcctctatgtgtccatgtgttcttatcatttagctcccacttataagtgagaacatgcagtatttgtttttctgatcctgcgttagttttctagggataatggcctctagctccatccatgttcctgcaaatgacatgatctcgttcttttttatggtgcatagtattccgtggtgtatatgtaccatattttctttatccattctaccattgatggccatttaggttggttccacgtctttgctattgagaatatgctgcaatgaatatatgcatgcacgtgtctttataatagaatgatttatattcctttgggtttacacctagcagtgggattgctggactgaatggtagttctgtgtttaggtctttgaggaatcctcacactgttttccacaatagtggagctaatttacattcccaccaacagtgtaaaagcgttccttttcttagaagacaatacctttttttgttgttgttgttgttgagacggagtctccctctgttgcccaggctggagtgcagtggtgtcatcccagctcactgtaacctccatctcccgggttcaagcaattctcctgtctcagcctcccaagcagctgggattacaggcttgcatcaccacgcccagctaatttttgtatttttagtagagatggggtttcaccctgttggccacgctggtctcgaactcctgacctcaagtgatccacccacctcagcctcccaaagtgtcaggattacaggcgtgagccaccgtgcccaggcaagaagggaatatcttaatgacaacttctccccgccgctttcctcgccaaaattcttcacattcacctttgccagtgttcctgtaacaacaatagttttcacaattgttctctgaacaagcaatggtagacctgatccagagcctgatattgtcatatcataaattaaatcttttaatgtagttccctctgaaataaaaggataatctttttttttttttttttgagacggagtcttgctctgtcgtccaggctggagtgcggtggcgcgatctcggctcactgcaggctccgcccccccagggttcacaccattctcctgcctcagcctcccgaatagctgggactacaggcgcccgccaccacgcccggctaatttttttgtatttttagtagagacggggtttcactgtgttagccaggatggtctcgatctcctgacctcatgatccgcccgccttggcctcccaaagtgctgggattacaggcgtgagccaccgtgcctggcctaataaaaggataatctaatgaagggtcctctttatttgacacttgatggtgagtgacagtgcggttgtggcagaaacagatcattaacatgagtgagatgcagaggaggcaatgacagctgccagttctatgagacctgggccaggcgacggcttcatagtagttgagtgttttattttattgcaatggtcctgattgcagcaacatattgtggtcacagacccggtttatttatttatgttttttatcttaaacaatttttttttgaggcagtctcactgtgttgcccaggctggagtgcagtgacacgatctcagttcactgcaacctctgcctcccaggttcaagtgattctcctgcctcagtctcccgagtagctgggtctacaggtgtccgccatcatgcctggctaacttttgtatttttagtagagatggggtttcaccatgttggccaggttggtctcgaactcctggcctcaagtaatctgcccacctgggcctcccaaagtgctgggattacaggtgtgagccaccacacccaacgagacaatagattcttgtaaactatagacacccaattgagctaacaaactctaggtcttacttcttttatcaaactgtgtatttgtacccattaatcagcttctcttcattctccccctcaagaataaacttttgtaaaaaagaatcatggagaagctcattctctcttcagttgcttttgctcagccatttctaccttagctatgagttaaaagtaaacccagcctgggcaaggtggctcatgcctgtaatcccagcactttgggaggctgaggcgggcagatcacttgaggtcaggagctcgagaccagcctgtccaatatggtgaaacctcatttctactaaaaatacaaaaaattagccaggcttggtggcaggtgcctgtaatcctagctacttgggaggctgaggcaggagaatcacttgaacctgggaggtggaggttgcagtgagccgagattgcatcactccactccagcctgggtgacagactgagactctgtctcaaacaaaacaaaacaaaagtaaacccagcctggtaaatccgggcagactctgtggctcagtttttgttcttctctaaaatttggtctcatgtggaacccacacattcccacacattaaaaaaaaattaaaagataactgaaaacatttactggagtttgaaccatgggagtcacagggtgattttacaagggctatttttaatcatgggagtgaatctagcggcatgagtggcttgagaaattagtgacaagggaagaatttaagatagcctatagaatgagcttcttttagaagactgttttagggaaataacttcaaatgtaaagcaaagtaggccgggcatggtggcgcatgcctgtcatgtcagcactttggaaggctgaggtgggagggctgcgtgagcccaggatagagactgcacctcagcctggcaacagagacagactctgtctcaaaacaaaacaaaaaggaaggttacatgaatgaaaagtgtacaaggaatacccattgtgtctttcacccagattccccagttaatattcgggcctgcttgcgttatcatttgctctcctcatctctctctctctctttctctgtctctttccctttctgtccctatctctgtctctctatatctctctatctttctatctctatctctttgaaatttgtttaaattttgttttttattttctctatttttgttattttttcttccttttttctctctatctctttatctctatgtatttctctatttcaatctctcgatctcttcatctctgtctctgtctctctccatctctatctctctatctctatctgtttctctacctatctatttctgtctctatctcatctctatctttctatctctacctatctttctatctctatccctccatctctatctctttctatctctctgtatctctctttgtatctcaatctctctatctcaatctctgtctgtatctctctatttctgtatctccatctctatctatctgtatctctctctctatgtctatctgtccatctgtatctctatctctatatctccatctctatctatctctgtctttttcttcacgtctctacctctgtctctttatttcaatctatctcttgatctctctatatctctgtatcccctatttctctatctttctttctctacttctctatctctagctctccgtctctcaatctctccctatctcttcctctgtctcccgatttcccctctcgtctcccttgtgggtatgatttagaagtttcatttatgatgaatctgacaagatcgaggttaagaaacaaagccagaggaaaccacaggctcagaggccagggaagttctgggaaattccccatgcagtgtgagaggatttgagaaacaggagggagtcttggggcatttgtgaaggcgatttcttagaaagaaacacaggactagtcgggtgagctttgctccgtcctttggcccatgttttaagcagatcaaatggtatcattagcccttgggggtataaaatatcaactaatcagcagtcctcttttctttttttaaacatttttattatttttttttaacatagagtctcactgtgtcacccaggctggagtgcagtggcgtgatcatggctcactgcagcctcgacctccttcctaggctgaagcaatcctcccacttcagcctcccaagtagcgtgactaaaagcacacaccaccatgcccaactaatttttttgtttttttaactttttggtagagacaggggcctctccatgttggccagcctggtctcaaactcctggggtcaagcaatcctcccacgttagcctcccaaaatgttgggattacaggtgtgagccactgcaccagctatgcccacatttttctaggtcaatgatacggaataaaaagaaagaaagactagtttctgctctcaagcagtttatattttagagtcaaatctagcaggtgaaatctagtccatggcctgttttttttttctgagacatgctctcactgtgtcacccaggctggagtgcagtggcaccatcatgggtcactgcagcctcgacctcccagactcaagcaatcctcctgcctgagctccccaagtagctgggactacaggcatgtgtcaccacgcccggctagttttttatttttatttttgtagagatgggatcttgccatgttgcccaggctggtctcgaactcctgagctcaagcgatccacctgccttggtttcccaaggtgctgggattacaggcgtgggccactgtgcccggcctccttgcctgtttttgtaagtgaagtttgattggaatgcagccatgatcatttgtttatgtaatgtctataattgccttcatgctgcaatagcagagttcagtagctgcaacagactgtgtaacccctgtggatatgcacatatagggggttagagaagggaagagagagagagattttaagaaatttcctctcatggccgcgcccggtggctcacgcctgtaatcccagaactttaggaggccgaggcgggcggatcatgaggtcaggagatcgagaccatcctggctaacacagtgaaaccccgtctctactaaaaatacaaaaaaaaaaaaaaaaaaaaaaaaaaagaaaagaaaaaaagaaaaaaaaaagaaaaaaaaaggaattgtctcacatgattgatgggactggcaagtctgaaatctgcagggcaggctggacaccccggggagagttgttgaatctgaagtcagagactagaggcaggactccttctccctgtggaggatttcagtctttttctcttaaagccatcaactgattggttgaggcccacccacattatggaggatctcccagggactttacccaaagtctgctgatttaaatgttagtccctaagccaggcgctgtggctgtaatcccagcactttgggaggtcgaggcaggtggatcccctgaggtcaggagtttgagaccagcctgggcaacatggtgaaaccccatctctactaaaaatacaaaaattagccaggtgcagtggcgcatgcctgtaatcccagctactcaggaggctgaggcaggagaatcttttgaacccaggaggcggaggttgcagtgagctgagatctttcggcctcccaaagtgcagggattacaggtgtgagccactgtgcccagccttgtatcctaactgctatatctcttcccttctttgtgtaccaaggtagttctgatattccaacttcatttggtgtaggtcactttctggtccatgattgaagcaacatgccaaactgttagagctcttaaaatttttaaaaattatttatttattttaatggataccctggtacccagttatctccataatatttaggtttccagattcagtggcagtattttcactgtaatttctgaactaatttatttatttatttttgagacataatctctctctgttgcccaggctggagtgtagcagtgtgatctcagctcactgcaacctctgcctcccaggttcaagtgatcctcctgcctcagcctcccaagtagctgggatcacaggcgcacgccaccacatccagctaatttttgtatttttttgtagagatggggtttgaccatgttggccaggctggtcttgaactcctggcctcaagtgatccacccatctcggcctcccaaagtgctgggattacaggcatgagccactgcacctggccgaatttttgcatttttagtagagatgggtttcaccaggttgcccaggctgatctcaaactcctggcctcaagtgatccacccgcctcggcccctcaaagtgcagggattccaggtgtgagccaccatacctggcatttatcttgtttttaatataggatggtaatgccttctttagatcatgtatgttaaatatgctttagaaacaaaaatttccttgatattttgacaaacctacgcttccttaggttaattttcataagtgttaatttttatattactaatcactgtactgctatagctaaatcaactagatatcagtttgtgtagtgttgctcaaaagatgtacaaatagcaagtttgataattgcttcaaaaatgagctttttaaaataaagaaagcaataatgttccaagtcagtggcagggggcaaaatacatacaacaaacatattgagacagagtatcaagtgcccatcagtttctcttataagaataacatgcttgaggaaggtcttgagaaaatcctccctccctctactaaacttttagtttccacatagtgtcggatgttacaattggtatgaaggataaatgcttttaggcaaaagtaaaaagctatctacaggctgggcgcggtggctcaagcctgtaatcccagcactttgggaggccgaggcgggcggatcacgaggtcaggagatccagaccatcctggataacacagtgaaaccccgtctctactaaaaatacaaaaaaatagccgggcgtggtggcgggcgcctgtagtcacagctactccggaggctgaggcaggagaatggtgtgaacacgggaggtggagtttgcagtgagccgagatcgcgccactgcactccagcctgggtgacagagtgagactctgtctcaaaaaaaaaaaaaaaaaaaaaaaaagctatctacaaagcaaaatccatagtgactttttgtaggaggctctcatctctggtggtaatattctttagtacttatacagcatagaggaaattgaaacaatattttggatacagtagcaattatttcttatagtcttactaaatgttacaaaattcctaaatatatgtaaatattcttcttaccacccattatgcaccagtttggggctgcctgatgaagtggctactgtttttgttttttctcttttttgacagggtcgtccaggctgcagtgcaatggcaggatcatggttcactgcagcctgaacctctttggctcaagcagtcctcccacttcagcctcctgagtagctgggactacaggcgggtgccacgtgtggctcatttttgtattttttttgtagatatggggtttcgccatgttttccaggctggtctcaaagtcagaggctcaagtgatatgcctgcctcagcgtcccaaagtgctgggattataggcgtgagccactgcacccagccatggctactattttaacagttaaacattgcacctaggccaggcacggtggctcatgcctgtaatcccagcactttgggaggccaacgtgggctgatcacctgaggtcaggagttcgaggccagcctggccaacgtggtgaaaccccgtctctactaaaaatacaaaaattagctggggaaggtggcaggtgcctgtaatcccagctacttgggaagctgaggcaggagaatcgcttgaacctgggaggcagaggttgcagtgagccaagatcgtgccactgcactccagcctgggtgacacagtgagactctgtctaaaaaaaaaaaaaaaaaaggaaaaacaaaacaaaaacaaaaattgcacctcaaaagttctgccatccatgcacaagaaacgggcacaatagtgaggactcctcagagatggcaaactacttcccaagtgaaaagttagtgatagagtgtctccaaattagaggagagagggacatgggtaagggaggtaggtagagcaaaaggactttaaaataatactgcttaggagtgtgtatgcgtgtgcatatatatgccatcacacccacctaattgttaaaaatttttgtagaaatgaggtctcactatgttgcccaggctggtcttgaacacctgggctcaaacactcctcccatctcagcttcccaaagtgctgggattacaggtgtgagccgctgtttccagccaggagtgtttttttttaaaatttatttaattaatgcatttgtttatttatttagagacagggtctcactctgtctcccaggccggagtgcagtggcatgatcttgcctcactgcaacctctgcctcccagattcaagagattctcatgcctcagcctcccaagtagctgggactacaggcatgtgccaccacgcctggctagtttttgtgtttttagtggagacagggttttgccatgtttggccagggtggtctcgaactcctgacctcagttgatctgcctgtcttggcctcccaaagtcctgggattataggcatgagccattgcaccctccagtagtgtttttttgtttgtttcttttttcttttcttttctttttcttctttttcttttttttttttgtttttgtttttttgagatggagtcttggtttatcgcccgggttggagtgcagtggcatgatcttggctcactgcaacttctgcctcctgggttcaagcgatcctcctgcctcagcctcccaagtagctgggatgtagacgtgtgccaccacaccctgctaatttttgtatttttactagaaatggggttttaccatgttgcccaggctgctcttgaactcctgacctcaggtgatccacctgtcttggcctcccaaggaattacaggcatgagccatcacacctagccaggagtgtttatttttaagataacttctataccttgtctgtccttgatcctaatccttgaataactcatgttcgtgctaaatacaatttctactctaaaggaagaggagtggtctgttaggagaagcatattttaaggagaagacacgaagacatctctgtcataaatgcaagtttacttggtgagtcttttggttacattactacattaactgtttctgctgctatttcaatctctttatcattgggacaggtattgttgaacatatccctactacttgtattcgttaggtatctccagatgccagtcattccttttttttctatatttttttattttctatatttatttatttatttttgagatggagtctcgctttattacccaggctggagtgcagtggtatgatctcggctcactgcaacctccgcctcccgggttcaaggtattctcctgcctcaccctcccaagtagctgggattacaggcacccatcaccaagcctggctaatttttgtatttttagtagaaatgggtttcaccatgttggccaggctggtctagaactcctgacatcaagtgatccacccaccttggcctcccaaagtactgggattacaagcatgaacaccgtgcctggccagtcattccttttggaatatcaaagttgtgactttttttttgacaatatgcagtttgggcagcagatggcaatcagctaatgccattttattgccattcagaaatttatgtgtagaaaacttagtgtcctgcatgctattttcatcaatttcatcagggagaggagaattcagatattcataagtttttgcagttttttttttaacttttattttagctaccagggtacatgtgcaggatgtgcaggtttgctacataggtaaatgtgtgccatggtgatttgctgcggagatcaacccatcacctaggtattaagcccagcattcattagctattcttcctgatgctcttcctctccttgccccactgacaggccccactgtgtgttgttctcctccctgtgtccattgttcagctcatagttataaatgagaacatgcgacatttgattttctgttcctgtgttagtttgctgagaataactgctccagctccatccatgtccctgcaaaagacatgatcttgttcctttttatggttgcatagtattccatggtgtatatgtaccacattttcttcatccagtctatcattggtggacatttgggttgattccatgtctttgctattgtgagtagtgctgtagtgatcatatgcgtgcatgtatctttataacagaatgatgaatattcctttgggtatatgcccactaatgggattgctaggtcaaatgtttttcctgcttctagatctttgaggaatcaccacactgtcttccacaatggttgaactaatttacactaccaccaacagtgtaaaagcgtttctttttctctgcaacctcaccagcatctgttgtttcttgactttttaataatcaccattttctgcagggtttttaagagatgcttcactcatgcttcattaacctctggccttgaattcttgatctatgcagagaatttggcaaagatgtccattccagcagtatttgattctgggtgttttggtgaaagctttaagtacttgggaggacataagacttcttcaggagcttcctcaatcttatttgacttcactgttgaaagttataagtggtgggtggttcccaggagccttgttttgcagatctgcaggtttcctttttcagatcaacagttgtgacactgaagacaactcctttgagctaaagaatcatgaggaatctctgggaaaaaaggcagattcctgtgctttcaccatcactgacagccttgacccagagctcaaggaggggctctttgtcttcctccttcaacttgttcagtggcatcgacaatgccaaggccaggtcagctgggctttgcaaacgttggcagctgctgcttctgctccaaggctgctctggctgatggctttggccatgctgctcactggacagtctggcattgaggtggccatggcctcagctcctcagcactgcaccacactgcagattgagccacttcttcaattggccttaaatttatcaaagggaaattgtctaggtgagcctgagttaatcacacaaactctataaatctgaatgtagaagtcaaatatcaagaaagtcagaagccagagagattcagaccttgagaaggatttgacctgtcgttgctggctttaaaggtggtaaggaccacatgaaaaaaacccaagaacatcttctaggagcagagtgatccctggctaacaatgagctaaaaaaacaggggcctcagttctacactgcaaggaactgaattctgccaacaacactaatgagtttgaacacaattcttccccagactccagatgaaaacacagcttggtcaactccttgattgtataaccctgagaatagaacccatataaatcttgcccagattcctgatgaagacaccatgaaaataatgaatgagtgttgtttcaagccactaagtttgtgatgatttgttacacggcagtagctaactaatacagagttatgtggccaacctgttgattgggatcaacagtcttattttgcaaagatacttcagaaccatggacagtggaacgcatgccaggggagagctgattggctggattagttaccatccaaactggagtgatcctattggacaatctttgacctagccactgatccctggtccagtcagattttgttagggtctacagactcaacttctctgccaaccatgaagatggtgcctcaggagtcctgtaaggtcttgagtgaacaagtctctgcctagttcttcagaaggatattgcaccaccctcttcctcatctacattagcctcctttggcttctccttcccacttcccagctattgcccagtgatgttcctgcagtcaggaactcccttcctttctctctttgatactttctatcctttacctagccaactctcattttttttttttttttttttttgagacagagtctctctgtcacccaggctggagtgcattggcatgctcttggctcactgcaacccctgcctcccaggttcaagcaattcttatgcctcagcctccccagaaactgggattacaggcgcacaccaccataccaggctaactttttttttctttttcttttattattatactttaagttctagggtacatgtgcacaatgtgcagttttgttacatatgtatacatgtgccatgttggtgtgctgcacccattaactcgtcatttacattaggtatatctcctaatgctatccctaccccctccccctatcccacgacagaccctggtgtgtgatgatccccttcctgtgtctgagtgttttcattattcagttcccacctatgagtgagaacatgtggtgtttggttttctgtccttgtgatagtttgctcagaatgatggtttccagcttcatccatgtccctacaaaggacatgaactcattcttttttatggctgcatagtattccatggtgtatatgtgccacgttttcttatccagtctatcattgatgggcatttgggttggttccaagtctttgctattgtgaatagtgccgcaataaacatacatgtgcatgtgtctttgtagcagcatgatttataatcctttgggtatatacccagtaatgggatggctgagtcaaatggtatttctagttctagatccttgaggaatcgccacactgtcttccacaatggttgaactagtttacagtcccaccaacagtgtaaaagtgttcctatttctccacatcctctccagcacctgttgtttcctgactttttaatgatcgccatcctaactggtgtgagatggtatcccattgtggttttgatttgcatttctctgatggccagcgacgatgagcattttttcttgtgtctgttggctgcataaatgtcttcttttgagaagtgtctgttcatatccttcacccactttttgatgaggttgtttgattttttcttgtaaatttgtttaagttctttgtagattctggatattagccctttgtcagatgggtggattgcaaaaattttctcccattctgtaggttgcctgttcactctgatggtagtttcttttgctgtgcggtaatttttttttgttgagatggagtctcactctgtcacctgggctggagtgcagtagtgcaatcttggctcactgcaacttctgcctcctaggttcagtgattctcctgccttagcctcccaagtaactgggattacaggtgcctgacactacactcagctaattttttgtgtttttagtaaagatggggtttcaccatgttggccaggaaggtcttgaactcctgacctcaagtgatcctcccaccttggactcctaatgtgctgggattacaggcatgagccaccatgcctggcctgatatctctgaaatttaaaaactatttagaatctcactgggacttatgtgctttcattgctaatgatctgctgctaaacctgtataagccccttccctctaggctcagggactgtcacataagaggtgggcatgtgagattgtaagggccaaatttgagggatagaattatttcagaccctcctactcaagcatgggcacacagatgcccaaacatctgccaaaataagactgtgtcttggcctactatgttgcctctctccatccatcccaaccataaaaagttttgctctccatagaattaaacaaaaattacggaaagatatccagatacctggtgtattagtctgttttcatgctgctggtaaagacagacccaattctgggtaatttatacaggaaaaaggatttacagttccacgtgtctggggcagcctcacaatcatgaaggaaggcaagaaggagcaagtcacgtcttacatggatggcagcaggcaaaaagagagcttgtacagggaaaccctgtttttaaaaccatcagatctcatgagacttattcactatcatgagaacagcatgggaaagacctgcccccatgattcaattgcctcccaccaggtacctctcacaatgtgtgggaattcaagatgagatttgggtggtgacacagccaaacaatatcacctggtgacaaagccttctggatatagtgctcccagtaataaaatgatgccaattatataaacaattttatcagccaccttaggaggaattactaaaaagactacaaaaagccttgcagcacattgaaagtctctaaattccttagcttaaatggttttaggaaaatgcttatgttttgtatagctaattactacaagcgtgtaactacaaccaagattacagtagctcaatgcatagaacttaaatagatgccaattttataacctcgccttttggcatttgatttttggctctcatgttacctaaagggttcccagggttaatgagaacctgcccaccgccattcccatctggcctggaatatttagttggctataaacattttgactccaaatcccttgggcatggggtcccaccgagggacatgttgggcctgggtaggcagacacaccaccccagcaataatatgggacaaaatagaagtttggccatcgatgttgcatctggcatataatgaccaaaaaaagggggaatgtaaactgataattaaatcccaagctccctcttcccactgctactgacagaatggatccctccttggccaagggaagcccctgtaaaaaaccttaaaaacttagttcccagacataatgggatgggaggccaggcataccttctttttgtggtttagacacaaaaactgaccaccattaatggtcaaataaaaatcacaagacagaacaggctttctgtaacaataagatagcgaattaagccaggtatggtggcgtgcacctgtagtatcaggttgccaggtccgatctgtggaccctgacccagtgatggatgaaagacgtacactgacacagacattttgcctgtcagtgtggctaaggggctctgctgcctgagtccacagcattggcctcgataaactggcgaagtttgcatttatttagtacagattaaatgacaaatgtctcaagtaaacaccactggagggtaattaacattgctgacctcctgagtagagagcagtcatgcacccgcagatgaccaaaggtcagtcttaggaccacatgagtaaacaagctatttagataaattcctctacattcctatgtatctacgccctaagcttttaagagaattcagctgcctccagccaaatcttttactgaagtgatgcaaactacccggccttccaagaaagtttgtgtctatttcctataactctataatttctcccaccaccctgaccaatctcctacaccaggtatttgggagactgaggtgggaagatagcttgagcctgggagttcgaggctacagtgagctatgactgtgccactccagtccatcctgcgtgacagagcaagatcgtgtttcaaaaaaaaaaaaaagataccaaattataaacagaacctaagaccatgccagcaaaggttaaatcacacactccttcacttaaaaagtaaactatgttcatcccagcactttgggaggctggggtgggcagatcatgaggtcaggagatcaaaaccatcctggctaacatggggaaaccccatctctactgaaaatacaaaaaattaaccaggttggtggcatgcgcctatagtctcacctactcgggaggctgaggcaggagaatcgcttgaacctgggagacggtggttgcagtgagccgagatcacaccactgcactccagcctggatgacagagtgagactccatctaaaaaaaagaagtaaactatgttctaaatgccacaaagtttttctttttcccaagcagccaaacaagcatttgcctctagataagcaacgttaaagcactttgcagctccactggatgctaactgaccaccagccataactatggctttaattaggcaagagacttatttcagtaactttttcctgatgaagaaaccactgaccacgggctagatctggctggtttacagaaattgcaagcttgtgtgcctttttgtcctgaaaagaacttttgatctatagggcttaatagtaatatttttattctattctattctattctattctattcttttttttttttttttttgagatggtatctcgctctgtcacccagtctgaagtgcagtggtgcgatcttggctcactgcaagctctgcctcccgggttcacgccgttctcctgcctcagtctcttgagtagctgggactacaggcgcccacgaccatgccaggctaattttctgtatttttagtagagacggggtttcactgtgttagccaggatggtctcgatctcctgacctcatgatccacccgcttctgcctcccaaagtgctgggattataggcgtgagccaccgcacccagctttcttttcttttcttttctttttgaggagtttcactcttgttgcccaggctggagtgcagtgatgtgatctcagctcactgcaacctctacctcctaggttcaactgattctcctgcctcagcctcctgagtagctgggactacaggcacaggaaaactcctgtttttaaaaccatcagatctcgtgagacttattcactatcacttatagccccactatgcccagctaattttttttttgtatttttagtagaggtggggtttcaccatgttggtcaggctggtctgaaactcctgacgtcaaatgatccacccaccttaacctcccaaaatgctgggattacaggtgagccaccatgcctggccccacaatatctttaaatcaatgactctcctcatggtttggataaggtccctccagatggaaaaatttgcttgtgattttagccatgattatagggatagctttatttttctaccctggactgtattgctgttgcatgctatgtatgggaatgcaagactggctttcccagaggcttctttttttttttttttgagatggagtctctctctgtcacccaggctagagtgcagtggcgccatctcggctcactgcaagctccgcctcccgggttcacgccattctcctgcctcagcttcctgagtagctgggactacaggcgcctgccaccatgcccggctaattttttgtacttttagtagagacggggtttcaccatgttagccaggatggtcttgatctcctgacctcgtgatctgcccgcctcagcctcccaaagtgctgggattacaggcgtgagccaccacacccggctgctctgatctttattatttctttcattctactgagtctgggtttggttggctcttgcttttctagttctctaagatgcattgttagtgtgtttattttaagtttttcttcttttttgatgtaggtgcttatagctaaagcttccctcttagtactgctttcactgtaccccataggttttggtatgtcatgttttcattatcatttgttttgaggaatttctgaatttattttttaattcttcattgacccactggttgttcaggagtgtattgtttaatttccattgtgtttgtatactttccaatatttctcttgttattgatttctagttttatttcattgtggtcagagaagatgcttgatattattttaattttttttgaatattttaagacttgttttgtgacctaacatatggtccatccttaagaatgatccaagtgctgaggaaaaggtgtttattctgcagctgttttcaatgtttattctgcagctttatttaacgtttattctgtagctgttgaaagaaatgttctgtaaatatctattaggttcattttgtctatagcgcacattaattctgatgtttctttgttgattttctggctggaagatctgtccggtgctgaaagcaggttgttgaagtttccagctattattgtattggggtctatctctcactttagctctaatagtatttgcttgttatatttgggtgctccagtgttgggtgcatatatattaacaatggccatattctcttgctgaattgatccctttatcattgtataatgaccttctttgtctcttcttatagtttttgtcttgaaacttattttgtctaagtatagctactcctgctcttctttggtctccattggcatggaatatctttttccatcccttcattttcagtctgtgtgtatctttataagtgaagtgtgtttcttgtgggcaacagatcattgggtcttgtttctttttttaattcattcagtgaccctatatcttttgattggagactttagtccatttacatttaatgttattattcataagtaaagacttacttctggcattttagtttgctttctggtcttcctttccttctttcctatcttgtttttagtgaaggtgattttctctggtggtttaatttaatttattgctttttatttgttttgtatccattgtatgttttttgatttgaggttgccatgaggcttgcaaatactatcttataaccattattttaagctgataacaccttaacactgcttgcataaataaacaaacaagcaagcaaaaagaatactagtaaaaattctaactttgcaggcagggtgcagtggctcacgcctgtaatcccagcactttggggggctgaggcaggtggatcatgaggtcagacgttcgagaccagcctggccaacatagtgaaaccccgttgctactaaaatacaaaaaattagctgggtgtggtggcgggtgcctgtaatcccagctactcgggaggctgaggcaggagaattgcttgaacctgggaggtggaggttgcagtgagctgagatggcaccactgcactccagcatgggtgacagtacgagactccatctcaaaaaacaaaacaaaactctaactttgccttcctgctttttaactttttgttgtttctgtttatatcttattgcacagtctgtgtcttgaaaagctgttgtaggtattatttttgattgttttatcttttagtctttctagttaagataagagtcctttatgcaccacagctacagtcttataatactctgtgttttttctgtgtacttactattaccagtgagtgttgtaccttcggatgatttcttactgctcattgacaaccttttctttctgactgaatcactttccctcaaattcacttagggacccagagcactccaccctgcagtggcaaggcttgctggaactcaagccctgaccactgaaatgggtgattccgctctggttagggccagtccaactgcttcccctatggatgggtcagctggggacagcccagttccgctttctgctgtgacaagtgagcagtgaattcaatgcaaagcctcacaattgctgcgctttccccctcccaactcacagactctctgtccacatggttgctgctggggggggtgggggaggggtggcattggcaattcaagactgtctttccttccctcttcagtgcctctttcagcgatatgaagtcaaaaccaggcactgtgagtgctcacctgatttttgggtcctaggaaggcactccctttgtgtagctagttgtcaaacttggtgctcctgttggagggatgattggtggcactctttatttggccaccttgctctgcccttcccagaagattctcttgtgtaagcccagggacttgtgaatcctttcaactccaggtggataggttctaccccatggctgcctaattctgccccttttcagcaggaagtagccagaatggatgcatcacctgttttccatagaaatggaatggagtttgatggtggggatttcgtaactggggacttcagtttaaaaatatattttatttattaatttttttattaggatagtcaagtgaagcagtgggagtggagaaggaacaaagaaatatgtaactggttgtgaacaattagttgtaaacaccactgcacttggaccagcctaaaaagatattttaattgccgggtgcggtggctcatgcgtgcattcccagcactttggaaggctgaggtgggcagatcacctgaggtcaggagttcaagatcagcctggccaacatggtgaaaccctgcctctactgaaaatacaaaaaaattagccgggtgtggtggtgggagtcataatcccagctacttgggaggctgaggcacaagaattgcttaaacccgggagaaggaggttgcagtgagctgagattgcaccactgcactccaacccgggcgagaagagtgagactccctctaaaaaaaaatatatatatatgtgtatattcatttatttataagtatctatctatctatctatctatctatctatctatctatctatctacacacatatatacttttaatcaccctcctctcctctcacctcttcattccttccctctctagatactcccttctggcaatgcatgcttatctaattaggcacttccttgagaaattccagaggctaatcttaaaacaaaccaggcaaatcaggagccctgattacagaatcctttcacttagggagagccactaatactaatggttagtccaccatcatttggacaaagtcaagataataccaaccagacccctgaacagacgacaacccaagttagccattggaacaagacacacagaccccataccgtgcaccattctactccacatctcccatactgaagtggcattgttgtctggggtaaatacctgggagtcgtcctcttgcaccaagaagattaacaatatggacacacacacatggaatgggttaagaagcagaaagtttaataggcagaagaaaggagagaagaggagcagctctctccctctttcgagagagaggtgtctgaaaaggaaaaagtggtggacctcatcagattttacaggcaggcttgagaaggaggtgtctgacttatgtaaggcccacagattggttcgaccaggtgtgatgtttacatggtgcgtggggaaggctggttgccccaccctaatcttatcatgcaaatggctttctgcttggtcagtgccatcttgtctgcctcttactgtacatgtggctggcaaagagaagagaagacggagctgccattttgagcatgcctattcccgagtagtttcttcctattggcacaactgccagcattcacctgtgcaaacttctagcttttttgtctatgtctgccactcgattttacaggctgctctttgctagagaagaaaatgatttgggggctgcttttcattaagaggaagaccttaccgaggacccccatatctccctatctgcctaagtaatttcttcttaactcctatatcaataccaagctttcctgtaaaatccctatggtaagattttaaaatttaagatgatgtttaagactatagtctcccatcttcccagtctgctggctctctgattaaacctgcttttccttcctccaatccttgtctcttgagtctggctttcaaatgatgagcagccaaacctgggttcgtttacacaagtcctgaaccacatgactgtttccctaacacacatagcatcttcccgctttcctcagatttctattcttccagttccaaacccaggccacgcttggtttatcgatggcagtgcttctaaacccaatcaattttcaccagctaaagctggatatgatgtcgtgtcccacatctttattatcgaagctgctgcacttcctccctccaccacttcccaacaagccaaactaattgctttaactcgtgcgctctctcttgctaacagaatgcacattaacatttacacggactccaatatgctttccacatcctccataaccatgctgccctctgggctgaaagaggcttctttaccacacaaggctcttccatgatcaatgcctccctaataaaggccctccttaaggctgctctcccgccggccatggctggagtcattcattgtaaaggacaccagaaacctactgatcttattgcaaaaggaaatgcctatgtcgacaggacagcaaaagaaatagccaatgcctccacatctgccaatattccagcccccgctccagagggccagtatttttctttctcctctatcactcccacctactcttcttctggaaacctgctctaccagtcttttccaactcagggcaagtggttcttaaatcatggaaaattcattcttcctgcctcacaagctcagttcattctttctttccttcatgaccacctccatgtgggatacaagtctctggctcgcctcctacagcccctcatctccttccctctgtggaaatccatccttaagaccatcacctctcaatgctctgtctgccatgccaccagcccccaaggctttctcaggcctcctccttttcctatgcatcaggctcgtggatttactccgacacaagattggcaaattgacttttctcatatgccccatgtccgtaaatttaaatatctcctggtttgggtcgataccttcaccggatgagttgaggcttttcccactagctccgaaaagggtactgccatcatctcttcccttctaacagatataattccccgatttggcctccctgcttctattcaatctgacaatggtcccgcctttattagtcaaatcacccaagcagtttctcaggctcttggtattcagtggaaacttcataccccttaccgtcctcaatcttcaggaaaggtagaacagacgaatggtcttttaaaaacacacctcaccaagctcagcctccaacttaagtacttctaccacttgccctcctcagaattagggcctgtcctcgagaggccacagggtacagtccatttgaacttttatatggacgcactttcttgctgggccccaacctcatcctagacaccagccctctaggcggctatcttccagtcctccagcaggctagacaggaaattcaccgggctgctaatcttctcttgcctactccagattcctagccatatgaagatacctcttttagtacatcctctcatcttttcactttacatttccagttttgccttacacaaggtctctttttccttcgtggcttctccacctacatgtgtttagctgttaattggacaggcacatgtacactagttttccttactcccaaaaatcaatttgcatatgggaccgaacagcttcctgttcccctcatgacaccaacatttcactgctgttttgtttttcttactattaatataagaagacaggaataggcctgaacttgctcactgctgaaaaaggaagactctgcatatttttaaatgaagactgttgtttttacctaaatctatctggcctggtatatgacaacataaaaacactcaaggacagagcccagaaactcgccagtcaagcaaataattatgctgaaccactttgggcactctctagttggatatcctgggtcctcccttagtccttaaatacctgtttttctccttcccttattcagaccttgtatcttccgtttagtttctcaattcctacaaaaccacacccaggccatcagcaatcattctatatgacaaatgctccttccaacaaccccacaatatcatcccttaccccaaaatctttcttcagtttaatctctcccactctaggttcccacgccacccctaatcccactcgaagcagccctgagaaacattgcccattatctctccataccacccccccaaaaactttttgccaccccaacacttcaccactattttgttttgtttttcctattaatataagaagacagtaatgtcaggcctctgagctgaagctaagccatcataacccctgtgacctgcacgtatacattcagatggcctggagcaactcaagaaccacaaaagaggacatttcactattgtgatttgttcctgccccaccccaactaatcaatcaatcaaccttgtgacattccttctcctggacaatgagtctcatgatctccccaccgcaccttgtgaccccgcccctgcccccaagagataaccacctttaactgtaattttccactacctacccaaatcctataaaactgccccaccccatctccctttgctgacactctttttggactcagtccacttgcacccaagggaaataagcagcctcgttgctcacacaaagcctgttggtggactctcttcacatgggtgtgtgtgacaggatagtcctattctaccctccttgcaatagtctttttgaataaagtcttcccttgctaaattcagatttgttttttatttgacagagtaatggtcggtgcacataaaagactaagcatgcacaaaagtgtgcacacaaagataaaggctgggtgtgtgcacttgaggaggctgtgctcagtgtatgtgtgtgtgtgtgtgtttatgggtactggtggtaggtggtttttgagttgcatatgcatctgagagtccagatagtctctgaatgtaaagaaagcttggtcttgtctgggcttgtctgggcttgccccctgagcggatgagacacaccccgtctcagcctatttgaataacggcaaagtgttaagccaattctcagggaggaaacaatcttgcaaatacaatatcatcttggggctggaggagagaagaatctgccacaggtctgccagtggaagtgtttgccttctctgggtcttgtgtggtcccatcagagaaccagggtatataagacagacaccagagaacagcttcactaagaccagaagaccccagcaccctcttccagaatgccctgggtcttgcatggcccccatggggaaaccagggtatatatgagaaagacgtcagagaacagtttcactaagactggaagagcttacttccctcttccagaatgcagtatttggagcaggagaatctgctctttaatagctttcagctacacaggtttcagttcctcaaaggctgcacttctgacgttgagaagtcagaacatagtaatatctgcatgaacattgcagcattactatttttttttaaattttactttaagttctgggatacatgtgtagaatgtgcagacttgttccataagtatacatgtgccatggtggtttgctgcacctatcaacccatcatctaggttttaagccccacatgcattaggtatttgtcctaatgctctccctccccttgccccccaacccctgacaggccccggtgtgtgatgttcctttccctgtgtccatgtattctcattgttcaacccccacttatgagtgagaacacgcggtgtttggttttctgttcctgtgttagtttgctgagaatgatggcttggcttccagcttcatccatgtccctacaaaggacatgaactcattctcttttatggctgcatagtattccatggtgtatatgtgccacattttctttgtccagtctgtcactgatgggcatttgggttggttccaagtctttgctattgtgaatagtgccattgcagaattatttataatagccaagacatgaaaacaacataagtgtccattaatgaaagaatagataaagaaagtatggtctacagacacattggaatactatttcatcttacaagagaagaaaatcctgacatttgggacaatatggatgaacctggaggacattaggctaagtgaaataagccagacacagaaaggcaaatactgcgtgatcttacttatacgtgtaagagttaaagaaagagaaaagaaacacgaaaaggggctcaacagtcaaagacgggtttattttggagaataaacctgagaggggcttctggccaattttggtcaagagtgctctctcttacagattaaaagtatatattggttttagggtgagggggcttatcacaagcttggaatgtttctgtgtggaggagaggtttatggcggggggttggaatgtctctggtcacaggggaggttatcttggggctgacatcttcccagccagaaaggaggttatcttggggctggaatgtctgtggttgaggatgttatttgtggtttatggtcatagtgaccttagccattaggctgatgccatttggatttaggcagttttttgatcaagatgaaacttttttttttttttttttttgggatggactctctctttgttgcccaggctggatgcagtggtgtgatctcagctcactgcaacctctgcctcccgggttcatgccattctcctgcctcagcctcctgagtagctgggactacaggcacccgccaccacgcctggctaatttttttgtatttttagtagagacggggtttcaccatgttagccaggctggtctcaatctcctgacctcatgatccgcccaccttggcctcccaaagtgctgggattataggtgtgagccaccccgcccagctctgatcaagatgaaacttaaaatggcagcacttgtccaagatggtgatactcctgttctgtcaatatggggaatctttaaaaaaaaaaacaaagccaaactcttagacagagagtagaactgtggttaccagggaataggggtaggaggaaatgagcagatattggggcacaaatatgtgggctctctggaggcttgcgagctattaaggagtgggtttaccccaaattggaaaatgtgggctctgcgttcaaatagcctcacttgggtcttagggctggtaaggtttgctggaaatttgcatgtgcattgtacatacacacaccagcatgatatttaaatcagtattatgagaattttaaagagatacagttttcctatctcagcacaacagactcatgaagcatttaccatcacccttaaaaaagaccacacacaaagtgtggtcggttaattggtgaattacgtagattcatcaaaacaccagttcctcctttgtgcaggctaaatttatgacagtggacatctctggtctctatcctgttaatctggatgtccgagtttaatgctaaatttcaaaagatgaggctgggcacagcagctcatgcctgtaatcctagctctttgggaggccaaggtgggtgggtcacctgaggtcaggagttcaagaccagcctggccaacatggtgaaacccagtctttactaaaaatacaaaaaaaaaaaaaaaaaaaaaaatagccagacttgttgtgatcttggctcactgcgacctctgcttcctgggttcaagcgattctcctgcctcagcctcccaggtagcagggactacaggcgcctgccatcatgcctggctattttttttttttttgtattttagtagagatagggttttgccatataagccaggctggtcttgcccttattacccttctgaccaagccgaggcgggtgatccttcccctctctcagctgggacaggtgaatcacccgtcttggcctcccaaagtgctgggaacaagcatgagtcaccgctcgtggtcctgttaatggacattgaatttccttttgaggaggtggacaagatggtgattaactgttaacggactttgaattttcttttttctttcttttctctctctctctcttttttttttttttggagatggagtctcgctttgttgcctaggctggagtgcagtggtgtgatgatcttgggtcactgcaacctctgcctcccaggttcaagcaattctcctgcctcagactcctgagcagctgggaccacaggtgcccaccaccacgcctggctaatttttttctatttttatagacatggggcttcaccacgttggccaggctggtctcaaactcctgacctcagctgattcacctgctttggcctcccaaagtgctgggattacaggtgtgagccactgcgcctggccttgtattttcttttctataaaaccctgtgtatacactcttttttcaaaaattgaggtgaaaatcatgtaacatcaaataatccttccttccttcttccctccttccctccttctctctctctctttgtctctttctttcttttttttctttatattcctttgtcaccctaggtggagtgccacatgaacatagctcactgcagactcctggattctagcctcctgcctcagccttcctgttaatggacattgaatttctttttctttctctcttttttttttttttggaaatggagtctcactctgttgcccaagctggagtgcagtggcacgatcttggctcactgcaacctctgcctcccaggttcaagcgattctcctgcctcagcctcccgagtaggtgggattacaggcaggcgtggtggtggatgcctgtaatcccagctactcgagaggctgaggcaggagaatcacttgaactcgggaggtggaggttgcagtgagctgagaccgtgccactgcattccagcctgggtgacaagagcgaaactccatctcaaaaaacaaacaaagaaacaaaaaatcaaaacaaacaaagaaaaaagaaaatagaactgattcaaatgacggttaagcacctgaagaaaagttctggactggtagaaacacaaggaaaccctcaaagactgtatatctaaaaaattctattttatattcctgtgaacagttttaatcctatgtggtagattaatgtaagttagtttatacaatacatatttttcctttttgactggcttatttcattgagtataatgtcctcaaactagtcatgccttcctaactatcccccaaagtcttaactcatttcagcattaactcaaaagtccacagtccaaaatctcatctgagacaaggcacgtcccttctgtgagcctgtaaaatcaaaagcaagttagttacttcctatatacaatggggtacaggcgttggatatacccattccaaatgggagaaactggacaaacgaaggggctgaaggtcccctgcaattccaaaatccagtggggcagttaaatcttttttttttttttgagacagagtgtcgctctgtcacccagtctggagtacagtggctcgatctcggctcactgcaacctctgcctcccgggttaaagcgattctcctgcatcagcctccaagtcgcggggactacaggcgcacgctgccacgcctggctaatttttttttttttgtattttagtagaaacggggtttcaccatattgcccaggctggtctcgaactcttcagctcaggcaatctgctcgcctcggcctcccaaagtgttaggattataggcatgagccactgtgcctggccaggcagtcaaatctttttttttttttttttttaattatactttaagttctagggtacatgtgcacaacgtgcagatttgttacatatgtatatatgtgccgtgttggtttactgcacccattaatttgtcatttacattaggtatttctcctaatgctatccctccccccctcccccgactccacactccacgacaggccccggtgtgtgatgttctcctccctgtgtccaagtattctcattgttcaatttccacctatgagtgagaacatgcggtgtttggttttctgtccttgcaatagtttgctcagaatgatggtttccagcttcatccatgtccctatgaaggacatgaactcatccgtttttatggctgcatagtattccatggtgtatatgtgccacattttcttaatccagtctatcattgatggacatttgggttggttccaagtctttgctattgtgaatagtcaggcagtccaatcttaaagctgccagataatctcctttgactctgtgtctcacatccaggtcacgctgatgtaagtggtgggttcccatggtcttgggcagccccttccctgtggctttgcaggatacagcctccctcccggctgctttcacaggctggcgtcgagtgtctgtggcttttccagatgcatggttctgagtccaggtaaggttggagaggggctgcagggctagatttgtgagggcgggtggcgcatgggtctcattttccctccctcagctgggacaccccaccactcctctcacttccccttctagaagtgagatcatggatgcaagatgcgggattatctggcttggaatcctgagtccactactatgtagatgaattgcctcgggcttgtgactcaggttttctgccactattttcctcaactgttaaatactgaggttccagctgttacaaaaccagtaactttggacagatgactcaacggtttacgcctctgttttcctcatctgtgaaatgggaacaatgatgattcctccagctttgtagggcttgcatgaacacgagctgagttaatgggataaaacagtgtgcagtccatattaaatgccgtaagaagcacttgactttgagtccccagttccaaaatccaaaaagccctggaaatcaagttgttttggtgaattgtttggcagcaatctctgacctgaactaactttttgttaattgtagtcttttttttttttttttttttttttaaagacagtctcactctgccacccaggctggagtgcagtggcactatctcagctcactgcaatctccacctcctgagttcaagagagtctcctgtctcagcctccctagtagcatggattagaggtgcccatcaccacacccagctaatttttaaatgtttagtagagatgaggtttcaccatgttagccagattggtaactgtggtcttgattttttttttttttttttttgagatggagtttcgctcttgtcacccaggctggagtgcaatgacatgatcttggctcactgcaacctccacctccggggtttaagtgaccctcctgcctcaccctcctgagtagctgggtttacaggtgccggccaccatgcctggctaatttttgtgtttttagtagagacggggttttaccacgtcggccaggctggtctcaaactcctgacctcaggcgatccgcccacctcggcctcccaaagtgctgggactacaggcatgagccaccgcgcctggcctgtagtcttgatttttatcccacttagtgtgaatgttaacacttctcattgtaaaaaaaaaaaaaaaagatgtggtgtttgattacaaaatgctgtcccgacctcactgaggtgatgcataaaagatggtataagcgctaggcgcggtggctcacaactgtagtcccagcactttgggaggccgaggcgggtggatcacaaggtcaagagatcgagaccatcctggccaacatggtgaagcccgtctctactaataatagaaaaattagccggacgtggtggcggatttctgtagtcccagacttgggaggctgaggcagaagaattgcttgaacctgggagggtggaggttgcagtgagctgagattatgccactgcactccagcctggacaacagggcgagactccatctcaaaaaaaaagatggtataatcctgtacaccatctttaaatactggtaaattctgagttccaaaatgtatttgaggtccaggcagtggctcatgcctgtaatcccagcacttggggagaccgaggcgggaagatcggcatttcgggagattggagtttgagaccagctggggcaatgtaatgagacctcatctcaaaaaaaaaaaaaaaaaaatagccgggtgtggtggcctgtgctggcggtcctagctatttgggaggctgaggtgggaggatcgcttgagcccaggagtttgaggccgcagtgagacaggatcatgccaccgcactgcagcctgggcgacagatcaagaccctgtattttcagtagaggtgaggtttcgccatgttggccaggcttgtcttgaactcctgacctcaagtgatcttttattattattatttaagttctggggtacatgtgcaggatgtgtagttccattacatagttaaatgtgtgccatggtggtttgcgacacccctcaccaggctgcagtgcaatgacgcgatcttggctccctgaaacttccgcctcccaggttcaagagattctcctgcctcagcctcctgagtagctgggattacaggcgccctggaccacgcttggctaatttttgtatttttagtagacggagttttacatgttggccaggctggtctcgaactcctgatttcaagtgatccacccaccctggcctcccaactcattaggtattttgcattgtctgctttgagagacagtcacccaaagtgatctttgtgtttcctctcttgtcaaatagatgcaccaaggagaaaacagaactttttttttttttttttgacaaggaatctcactcttgctcaggctggagtgcagtggcatgatcacggctcactgcagcctttgacctcctgggctctacccaatctcccacttcagcctttggagtagcttggactagcacaccactacatctggttaatttttgtattttttgtagagatgggggtctcactatgttgcccaggctggtcttgaactcctaggctcaagcgatctgccttcctcagcctcccaaagtgctgggattacaggcatgagccactgtgcccagcccacttcctctattcttcaaacatccctaaccaagaacattttttttttcctgagacagagtcttgctctgttgcccaggttggagtgcagtggcgcaatctcggctcactgcaacctccacctcctcggttcaagcgattctcctgcctcagtcggccgagtagctgggattacagatgcacgccacgaagcccagctgatttttgtattttttaataggaaaatgaaagaaaaagctcaatgccttctcttgtcctgccaccactaccccccaccacactcccaccccaaccccgggtggcccctgtgtgtacactttttctcttgaacttaaataaaataaaataaaatttaaaaaaccctaatcagcagcagtggtcaggggcgcacccactgcactccaaagaaggtctcatcagtgtttcgggaaggcaaaagtgtcccagtgaggttggtgcagagtgtgtcccctcgggccaggggcgtcaggcgctgggaggcaatggtacaaccttggtggaagctgagacgcagcaggctgatgctacgggaggcgggagagcagattcccacggccagggtggtggggtggtgcctggaggccgtcgtggaggagcagatggccagcgtcacctggatgtgtaccatgtagatgccatcacgatggatacgtagctgccccttgtccagctctggtccatgcaggaaggagcggcccagtgctgggcccccctgccagtatagcctggggtcctgctgaggtcctgggggcacagggttagagggatgagaggatggaggtttagggaaactgaggcacagggggtcatagagaaagtcagatatagagatcgagagttagagatcaaggaataggttggacgtggtggctcatgcctgaaatcctaacagtttaggaggccaaggcgggtggatcacctgaggtcagcagttcaagaccagcctggacaacagggcgagaccccatctctacaaaaaataaaaagtcagccaggtgtggtggtgcacgcctctggtcctggctactcttgggaggctgaggctggaggatcgcttgagcctgggaggctgagactgcagtgagctatgatcacaccactgcactccagccttggtcacagaaaccctgtctcaaaaaaaagggagggggatagaaggttagagatctaaagggaaggagagaggggtaaggggaaaggggtagagacagggagagagagacaccaggagagagagagacaaaaaaaaaaaaaaaaaaaacagaaacagacaagggtaaagatagagggggagggagagatatatagagagagaatgcagagagagagcaagagagagagtgtatgtgtgagagaggacgagagtgcacgagagagtgcgacagagagcatgagagagagagcatgagagagcgagagagtgtgtgagaggacgagagagcttgagggagagtgcacgagagagtgcgagagagcacgagagagcaggagagagtgcaagagacagcatgagagagagagagatcatgagggagagagagcatgagacagcgagagagtgtgagagagaggacgagagagcttgagggagagtgcacgagagagtgagagagagcacgagagagcaggagagagtacgagagacagcatgagagagagagcaagagagagagtgtgtgtgtgagagaggacgagagagcttgagagagagtgcacgagacagagtgtgagagtgagctcgagagagtgcatgggagagtgtgtgtgtgagagaggatgagagctacagagctcgagagtgcacgggagtgagcgagagagtgcctgagagagtgagacagacagcacgagagagacagcgtgcgcacgagacagcgcgcaagagagtgcacgagagaattccccaagggacgcctgctcgggtcacaccctgaacgccaataaaagctttggctcccaggaccctttttttttcttgctttccacccgctggttgagtgtgtgtctcagagagctcccctaccttcccgttggccctcttctctctaggatctttattttctttagagacagggtctggtcctgtcacccaggctggagtgcagtggtgcaatcatagctcactgcagcctcagcctctggggctcaagctatctcccacctcagcctcccgagtcactgggaggtggcatgcgccaccatgaccagctaattttcaaaattttgttctagagatggtggtcttgctatgtttcccaagaaacatagtctagaactcctgggctcaagcgatcctcccacctcagcctcccaaagcgctgggatcacagccgggagccaaggtcctcggctatatttcacgtgtttcatctcagcgtctcctgtctccgcaacttatctgactgacacacctgagcctcactctcctcctcactcaaggctctcctggagactggctatcttgttaggaaggaactgaacggggtcaaacaggagccccaagggtgtttaccaggctttgcaaatttcctgtaagagtgacacctggtcccctgtcacacacttaggcatgatatcatccaccagaagaaagagctgtcctgtgaaagacactgtcaacacctgtggccaccacccctggtgccccatcgatgtggggctggacagccactctccagaaaggggcctcaagaccaaattacaggaaaaatatggcaaaggccggggagggggggaagatatatcaggggtcagagacccaaggagaagagagagcaacaaaggtcccttccattacaaaatggaaggaacaaaacacgcaagcgtgcagtaattttagtctctggggatgaaccgtggaaaaacagaagaggaagaagcgttcgagagaggctgggaggaggtagagacttccacctagagcagaactgttcatttcttctccctcaaggcttcttgccaatgccacccactcagataccacccccccacccgaccgccgcgactccactttaaatgaaaatccccaaccctggcatgcccggattccccacccacctccttgcctgattttttctctaaaacctgctcttggcctgttttactctacgtggcattgctctgtttttcacatgttcgtttttatttttttggtcatctcctcctcggtaggagtgatagtagaagggaagctcaccaggcagggatttctgtctgttttgtgcgcgactgcagtaccggaacagtgcctgcccactgcagatgtataattagtgcttgtagcatgaatggaggaagggtagcctttcctgtgagcgttttcgtttactaacaaaacccctttgattcttccaagggaggagatcgaatgtgaaggactgagagggaaagggagagaaaggtagtggatgcccagaaacacaaacctgctcgctctctctctcctctctctctctctcgttctctcccttttcctttttctcttgggaatgatctctttctcccccgccctgtttttcttcttccccctctctgtctctgtctcttcctctctgttattctccttctcttttcctctctctggctttctttcttttctttctcttatttctttttttctctttcttctttctttttcctttctctctctctcacctccctccctctctccttccttccttcttctctttcttttccttccttcctttctttctttttcttttcctttcttctttttatttatttatttgacagaatctccctctgtcacccaggctggagagcagtgccattatcttggctcactgcaacttctgcctcccaggttcaggcgattctcctgcctcggcctcctgagtagctgggattacaggtgcctgccaccacacccggctaatttttgtaattttagtagagacggggtttcaccatgttggccaggctggtctcaaactcctgggctcaagtgatccacccgccgcgccctccgaaagcgctgggattacaggctccagcaaccacgccaggtcgcctctctcgtttttattctctcttcctctatctgtcttttttctctttctccgtctctctccctctctctcgttctgtctcccccgcctgtctccctccctccctcttccactctccctgcgtctctccctgtttctttctttccccttcttctcctgtcccgtctgtcccctctgtccctctctctgttcttttttctgtctctccctccctttctctgggcctctccctccctctctgtcttctctctgtctccccctctccgtttccctccctatctctccctccctctctccctccgtctctgtctgtgtctctttctctctgtctctccccacttgtctttctacctctccttccttctctctctgtgcctcttcttctccccgtccctccacgtcccccgtgttacctgtgtgattcagctgcagctcagctacgtcccactggaagaaaagaccagaaaacagggcacggacgtaagcagagaggttctatgtgtcccctgtgccaggagctctcttttctctgtccatcctcctttccacctctcatcccacggcgcgcactggtgattttatttcattttatttttttttactcttaagacttcttaaagaggaagcaggtctgaaccagcggggaacgtgaagtcgagaccttcaaaagaacttcttcgtttcccgaatcgttttcctggatgtcactgggcgcgagagcaccgcgcgcagcggactctctacgctgcaaaggcgcccggcgcggtccccaaagggacccctcccccacccggagcgagtggctggggccatcccgtcctaggaggccccaggaagcccccacgcccagccttgtgaagcccccagcagcctctgagtcagcctgccgggggaacaccagagccgagtcatcttccatttccatgtgtgcctacctttcccatcccgggatctccctgtacctcctggcagggctgcctgtctcgtagcccctacaccgggcagcctggtccccgcctcgcctccctgttctggtctctgtctctgccctaccagatcttcctctctggcctctttgtacccatctcattctgtcttttcggtcacgcgcctctctatgttttcttcccaacttttccatctcaactcaccccaagtgactcgagcggcagctgctgctgagcctgtgcgaagcgctggatgcacaccacgaggcagatcaccaagcccgcgaccaatgggaccaaagcagcccgcaggacgcacccatagggcctgcgccgcaccgagcagcccgaaccctcctccggcatcgccgcggcgatcacctccgctagcgcaggaggggcgatgggggcgcggagcgctgccgagaaggaaggaaggaaactgcagccccctcccggggctcctgggcgtctacttgcttcaacctgtcaggggaccagcctgcccctctctggggatgtccggccggtcgaggggagggacttgagcaattggcgaggggaaattccctccaaccgctgccagtctgaagatcctaaagtgggtggaggcagttgccaggatgcaggcagtggccccgggtgagcctcagagttgcctgcccccaacccctccccgcccgaccttcaggcaggagacattcaatcttcctattcccctctccacctcattcttctggggcccattcatttattcaacaaacctccactgcacatttattagggattagattgtgctgtgcactggggatacagcagacatccaagaattgggggtgctccccaaatattcgtgtacccctctcctgcatttttttgatttgttttgtttttgagacggaggtctccctctgtcacccaggctggagtgcagtggcgccatctcagctcgccgcaacctcgatctcctgggttcaagcgattctcctgtctgagcctcgcgagtagctgggagtaacatgcgcgcgccaccatgcctggctaattttttgtatttttagtagagatggggtttcaccatgttggccaggctggacttgaactcctgaccttgggtgatccacccgccttggccttccaaagtgctgggattaaaggcatgagacactgcacccggtcagttatctcctgcattcttggagaccacctgcttttttgtttaaagttaaattaagttaatatttttattttttatttttattttattttattatttattttttttttttttgagacagagtctcgctctgtcgcccaggctggagtgcagtggcgccatctcggctcactgcaagctccgcctcccgggttcacgccattctcctgcctcagcctctcaagtagctgggactacaggcgcccgccaccacgcccggctaactttttgtatttttagtagagatgggttttcaccatgttagcgaggatggtctccatctcctgacctcgtgatctgcccgccttggcctcccaaagtgctgggattacaggcgtgagccgccgcgcccggcctaaattaatatttttagagacagagtgttgctctgttgcccaggctggatgcagtggcgccacacagctcacagcagcctcaaactcctgggcttcagtgaccctcccatctcagccttttgcatagttgggtctaccagcacacgctaccatgcccggctaattttttttttggggggggtagaggatagggtgttactatgttaccaggctggtctcaaacatctgggctcaagcgatcctgctgcgtaggtcccccaaagtgccgggatgacaggtgtgagccaccgcatccagcctcctgctgctgttctcgatggctgtagtgggttaacggtgtcctcccagaattcatggcctcctggaactgcagaatatgacctcattttgaaattacggggttttttttgcagatataattaggcttaaatgaggtcatactggattagagtgggccctcaggtggagagaaaagaggctcatagagaaggagccgtgtgaaaacagaaacagaaactgaatgaggcagatgaaagtcaagaaacaccaagaaggagccaggcgcagtggctcacgcctgtaatcccagcactttgggaggctgaggcaggcggatcacttgatatcaggagtttgagaccctcctggctaacacggtgaaacccccgtctctactaaaaatacaaaaaattagccgggcatggtggcgggcgcctgtagtcccagctactcaggaggctgaggcaggagaatggcgtgaacccgggaggtggagcttgcagtgagccgagatcacgccactgaactccagcctgggtgacagagtgagactccgtctcaaaaaaaaaaaaaaaagagttggagaccagcctggccaacatggtggaaccccatctctactaaaaattcaaaaaatagctgggtgtggtggtgggcacctttaatcccagctactcaggaagctgaggcaggagaatcgctcaaacccgggaggcagaggttgcagtgagccgagatcacaccattgcactccagcctgggtgacagagcgagactctgtcttaaaaatatatatattttttaaaaagaggatccagcctctttttccggctggaaccatggagggtgtagaagagaagaagaaggaagttcccgctgtgccagaaacccctaagaaaaagcgaaggaatttcacagagctgaagaccaagcgcctgagaaagaagtttgcccaaaagatgcttcgaaaggcaaggaggaagcttatctatgaaaaattgaagcactatcacaaggaatataggcagaggtacagaactgaaattcgaatggaaaagatgtcaagaaaagctggcaacttctatgaacctgcagaatccagactggcgtttgtcatcaggatcagaggtatcgatggtgtgagcccaaaggtccgaaatgtgttgcagcttctttgcctttgtcaaatcttcaatggaacctttgtgaaggccaattaacatgctgaggattgtagagccatacattgcatgcgggtacctaaatctgaagtcagtaaataaactaatctacaagcgtggttatggcaaaatcaataagaaacgaattgctttgacagataacgctttgcacgatctcttggaaaatatggcatcatctgtatggaggatgtgattcatgaggtccatactgttggaaaacgcttcaaagaagcacataacttcctgtggtccttcaaagtatcttctccatgaggcagaatgaagaaacagaccacccatttcgtggaaggtggagatgctggcaacagggaggaccagatcaacaggcttgttagaagaatgaactatggtgtgtactataattatttttctaagctgttcaataaacattacctgctctcaaatggaaagaaaaatatgtctgtatatacatacagttagggtcccaagggcctctggctatgaatcatcaagaagtcagtgtcatcagcagcaaactcacagccaacagcgctagaactcgtgcctggggatagcttctctaacacgtggatttcctcctctgtgaggctcatcacggcctccttgctcttgggggacattagacagggcttcagcactatttgggggctgtttgaaacagcaaaattaccaacaaaaagcaaaaaattgaaaggagataaaaatgggagatttcagagcctgagcctatagcatttgctgggtgggtgaagagggtggtcaaagaggtccagaattttgaggtatccagaaatcaaaatatcctccctgagatccccaagtactaaagggatttccttcacggaagccctaggactccaggtctgggggaagcgggtagacagcaccttcaagacaatctcctaccttaatttatttaatatttacttagctgatctttttatcagcttaagatataaatagtttagattcatatcattaagaaataactaataccttctaaaagatgggggaaagagagatggggtggggtggctcatacatgtaatctcagcactttgggaggccgaggtgtcttaggaaaatcccaaaatgagacaggagcagccaactcataaaaataaatacaactgcttggccgggcgcagtggctcacacctgtaatctcagcactttgggaggccgaggcgggcggatcacaaggtcaggagttcaagcccagcctggccaatatggtgaaaccccgtctctactaaaaatacaaaaattagctgggcgtggtggcggacacctgtagtcccagctatctcgggaggctgagtcaggagaatcgcctgaacccgggaggcggaggttgtcgtgagctgagatctggccactgcactccagcctgagagacagagagagagtctgtcttaaaaaaataaataaataaaaaaaatacaactgcttatgaaactgaatctcgttcaccacaagaaaattggaaattgaaagctccgtgaaacacaatttttctttctctctctctctctctttttttttttaagatcgtgtctccctctgtcgcccagcttggagtgcagtggcgccatctcggctcactgcaatctccgcctcccaggttcaagcaattctcctgcctcatcctcctgagtagctgggattacaggtgcccaccaccacgcctggctaatttttgtatttttagtagagatggggtttcaccatgttggccaggctggtcttgaactcctgacctccagtgatctgcccacctgggcctcccaaagtgctgggattacaggtgtgagccactgtgcccagccacactttatcttgtcacctgtgatttggtaaaagatcagagtgtttgatgattcactgctcagcaagtgcgtgggtgagaaggagcctcaaacctggaggctaggagctgaaatggatccaactttctggaaggacagcttgttgaaatctatcaatgcaccaaaatgcaccttccctttggtccagaaattttacttcaaggatattctttcgtaagcacacttgcacgcgtcacagacgcggacgtacgcacacaaactcaacgtggtgtggtttgaatgataccggaacacaaccaaccagaagacccatgcgcaattgagggtttagtcctgtgctaagcacttgtcaggtttcaccttttctgaccttcccaagaaccctatgaagtgaatcatgctgttatttctattttccctgtgagcaggctcagagaggaaggccaccagcttaatccacctagcaaggagcttgggagaggaagtgcctagatttgaatgtggatccatatcgtgtacctgaagaacctggaccttcccacctgagtcacttagtgacttgacctggcctctgaccactttccagtctgtgcagttctgctggaggtcatttgcaccattttttattttttaatttttatttatttatttatttatttttgggacgcctttctctgtcacccaggctggagggcagtggcgtgatctcggctctctctgcaacctctgcctcccgggtttaagtgattctcctcctgcctcagcctctcaagtagctgggattacagatgtgcaccaccacatccggctaatatttgtatttttagtagagatggggttttgctatgttggccaggctggtttcgaactcctgacctcaagtgattcgccaactttggcctcccaaagttctgggattacaggcatgagccaccacgccccacggtcgtgtgcattatttttgagaagaaggttttctaaaaccagagtttccccatctgcagactctagagctgaggctccaggacaagacgtccactgatgttggcactctctctctctctctctcttgctctaagtcaggggaatcatgagccctgtgaagggaaagagttgaggggagagacccagaggacagttggagcacagaaagtaagatcactttcctcctgaggaagcccgaggcccaccaggctgatttttggctgccttctgctttcccccaagggaaatctggaaacttctgcctctcttccataaccctggaagccgcgggcagcttgaaagtgccaactcaggcttcctctttgtccaacttggtcactccttctgtttccctttgctgtggctgatctcaagttgccacagggatatgccccttggtgttgatataggaattaaaaaggaattactggctgggtgcagtggttcacgcctgtaatcccggcactttgggatgccgaggtgggcagatcacctgaggtcgagagtctgagagcagcctgaccaacaaggagaaaccctgttaagggaggagaccacccctcatattgtcttatgcccagtttctgcctccaaagaaagaaaaagtaaaaacaaaaaggcagaaaggaaatccacaagcagaaagcccagcacctcaccctgggcctggtagttaaagatcgacccctgacctaatcggttacgttatctatagattacagacattgtagagaaaagcactgtgaaatccctatcctgttttgttccgatctaattaccggtgcatgcagtccccagtcacgtacccgctgctcgctcaatcgatcacgaccctctcacgctcacccccttagaggtgtgagcccttaaaaaggacaggaattgctcacttgaggagctcggctcttgagacaggagtcttgctgatgctcctggccgaataaaccccttccttctttaactcggtgtctgaggagttttgtctgcggctcgtcctgctacatttcttggttccctgaccgggaagcgaggtgattggcagagggtcgaggcagctccttaggcacttaagcccgccctgtggaacatccctgcaggggactccgaccagcccgagtggcgcggatcctgagagtgcttccgggtaggcatttgcgccggtgggacgcctcgccagagcagtgtgtggcaggcccccgtggaggatcaacgcggtggctgaacgccgggaaggaacgggcacttggagtctggacatctaaaacttggtaagactagtctttgaaacttgcccactccgtttgagtggaagcgtggcctgatcacccacggcatgcctgtaccggcactttggttttggttttgacttggtttgaattgcttgacaggattggtctcaggaacttgcccactccatttgagtggaagcgtggcctgatcacccacggcgtgcctgtactggcactttggttattgtttttgacttgacttggattgcttgatactttggttttggttttgacgtggcttggatatctggatactccgattttggttttgattttggtttggtgcaaactgcaaaagtgtgtgtgtgtgtaccctttttacccgttctttgttttgtggtgtgcgtgtggtgtgagcgtggtgttttgtctcgaagaagcataggtcaggcaccaataagcccaccctactaggaactaggttgaaaattttcaaaaaaacatttaaaggagactatggagtactatgacaccaggaaaacttaaaactttgtgtaagatagactggccagcattagaggtaagttggccattagaaggaagcctggagaggtcctctgtttcgaaggtatggcacaaggtaatctgtaagccagggcacccagaccagctcccatacatagacacttggttacagctggttttagacctcccgcccccaacacacagtggttgagagaacagtagcataagtggctggcagaggcaaggaaagaccagcagagagagagaaaggaaagagacagagaggaagagacagacaaagagggagtcaaggagagagagagaaagaaaaaaaaagagagagaaagagagaggcagagagagagagaaagagacagaggcaaaaggaaagtcaaagagagagtgacaaagtcaaagagagaaagaaagaagatgatttaacattaaccactgaaaattccattcactcagcaggtttcctaacaggggatctaaatcttaattaccaaatacgaacgtctgaccagacgtaggaggaactcccttcaggacagcatgaatgatggttcctcccgggtaattaaaaaaaaaaaaaaaaagccatctataccaattctaatttagagaaaacaaggtcttatcaatagcaaaggataattaaaatcccgacttacaaggttttcaacaaaagtaaagtttgctaaaagttaacagtttaacatgtatgacagtaacttctatgcttctggccttagacagtctagtccacagacataaaaaaaggttcgctttggaaaagaatggttatcatcttcgagaaaaaaaaaaggaaaaaaaaaggtggggcagaatttatataaaaagagtattatatggtaaattcttgtcttgaaataaattaactggttgtttaaagaaagaaatgtttgtagtaagtccgaaagttaaggcatgtcgaaaaattgcctgtaaaagttgtgaaagaaaaataagttataaaaatagtgttaaaaaaagaatttatgcaaaaaatgttgtataatttaaaagtaactaggcctcctgaatgtaaaactattgaaaaaaaaaacagtttatgtgcaaggtgtataagaaaagtaaaatatacctttagtaaaaggattataaggaggcataagagtgtacatttttacctacattaaaaagttaagttaaaaaaattattgttttgaagatttaagcaagttttaaaacgttaattgtaaagaaaattctgtgtgtaaacatattagctaaagttaaagaactatcacccagtttttctggacattaaagtaaaagcataacaggtttttcttaaaccaccaacctgctctttagcaaaaattataaaaggttgaaaagagtctataaaatcataccttatagtcaaacattaaaaattagataaatatgtctacaaggttttattaaaattaggtttaacattaataacacactaatataaaaataaaatttagcttatctggtataaaaatcatacaaaaagcattattaaacataaaatagtgtttagatttctttggtctaaaaactaataaaaataggtgctgaaggaaatttctcagtaaaaaggcactaaggactataaagtccactgccacagtccccacatttaaaacaaaaggtcaatttcttagaaattatatacttggtttatcttccactttcttttctctcaaaaagtaatatgaggggctgtcccctcccttaacagggtttctccttgttggtcaggctgctctcaaactcccgacctcaggtgatccgcccacctcggcctcccaaagtgatggtcttgtgtcatttaggccaattagataaaaaaaaaaaaaaaatgaaaaggatccagtccaccttcagaaaggaaaaaatggctcttcctgtactaaaggacaatgtaaccccttagagctagtactaaccaatccccttgatcctcgctggaaaaaagaggaacgtgtaaccctaaaaaattgataagagctagactggatcttcaagtaaatatcgtggtttgagaaaaagtgtataaatgctctcccgagccagtatttcaaaccttctatgataaactaaaagtgccagtaccagaaattccatgaaaaacaagaaatttgtttttgcaattagccgagcatgtgacccagtctctcaatgtcacttcatgttatatatgtggaagaactgtcacaggagatcaatggccataggaagcacgagaattagtacctacagacccagttcctgatgaattcccagctcaaaagaatcaccctgataatttctaggtcctaaaagcctcaattattggacaatatcgcatagctagagaaagaaaagaattcactcaccccgtaggacgatttagttgtctgagacagaaactgtataatggtaccacaaaaacagtcacttggtagagttcaaatcacacagagagaaatccacttagtaaaaaattcccaaagttgcaaaccgtgtagacatagccggagtcccaccgggactagacagccccgactagattatgctacgtatgtaggcatagagcttatgccaaattgcctaaccagtaggcaggcagttgtgttattagcactattaaactatctttcttcctactgcccataaaaacaggtgaactcctgggcttccctgtctatgcttccctcgaaaagagaagcatagctataagaaattgaaaaaatgataaatggcccccgagagaatcatacaatattatagtcctgctacttaggcacaagatggctcgtgaagatactggactcccatttacgtgatcaaccaaatcatatggttacaagctgtcttaaaaataatcaccaataaaaccggcacagccttgaccattctggcccagcaagaaactcagatgagaaatgctatctctcaaaatagattagctctcgactacttgctagcagctgaaggagaagtctgtaggaaatttaaccttactaattgctgcctacacatagataatcaagggcaagtagttgaagacacagttagagctatgacaaaactggcacatgtgcccgtgcaagtgtggcataaatttgatcctgaggccatgtttagaaaatagttcccagcgctaggaagatttaaaactcttacagtaagagttataatagtaataagaacctacttactgcttgcttgtttgctacctgtacttcttcaaatgataaaaagcgtcatcgctaacttagttcaccgaaatgcttcagcacaagtgtactatatgaatcattattgatctgtcttgcaagaagacacgggtagtaaaaatgaaagtgagaactccagtattgagcgagagtctcaaaagggggggataagggaggagaccacccctcatattgtcttatgcccaatatctgcctccaaagaaagaaaaagtaaaaacgaaaaggcagaaatgaaatccacaagcagacagcccggcgccacaccctgcagcccccagtcacgtaggccctgcttgctcaatcaatcatgaccgtctcacgctcacacccttagaggtgtgagcccttaaaaaggacagcaattgcatcctcgaggagctcagctcttgagacaggagtcttgccgatgcccccggccaaataaaccccttccttctttaactcggtgtctgaggagttttgtctgcagctcgtcctgctacactatctctctaaaaatacaaaattagctgggcgtggtggcacatgcctgtaatcccagctattcgggaggctgaggcaagagaatcgcatgaacctgggaggtggaggttgtggtgagccaagattgcaccattgcaatccagtctgggcaacaagagcgaaactccgtctcaaaaaaaaaaaaaaaaaaaaaaaagagagagagaaggaattacttaggcagagagcaagggcatgggagtcctcggtaaggcttttctttttaatgaaaagcagccccaaatcattttctaacaaacagcagcctgcaagctgggagcttgcctggatgaatgccagcgggaactaaggactagatatattgaagatggcggctctatcttcccttctctgccagccacgtgtgctgtaaaggagcagacaagatggcacagatcaactagaaagcctatttgcttaagaagggtaggctggggcagcggggtgctgtggctcacgcctgtaatccctgcactttggaggccgaggcgggtggatcacctgaggtcaggagttcgagaccagcctggccaatgatgaaatccaaataatagctgggcgttttagtgagcacctgtaatcccagctactcgggaggctgaggcaggagaatcgctcgaacccgggaggtggaggttgcagtgagccaaggtcacaccactgcattccagcctgggtgacaaagtgagactccatctcaaaacacacacacacagaattagggtggggcaaccagccttccctgcacactatgtagacgtcatatctaatcaaatcaatctgtgagccctgtgtaaaacagacaccgccttctctagcctgcctataaaatctgctgtggtctgctggctccccttttttcggatctctctctctctctctctcagctcctctctgctctcttttctttttttttctttgatatggagtcttgctctgtcactcaggctggagtgcagtggcctgatctcagctcactgcaacttccccctcttgggttcaagcaatcctcctgcctcagcctcccgagtagttgggattacaggcgtgcaccaccatgcccagctacttttttgtatttttaggagagatggggtttcgccatattggccaggctggtcttgaactcctgacctcaggtgatctgcctgcctcagcctgggtcccaaagtgctgggattacaggcgtgagccatcccacccggccctctctcctttcttctattaaactttccactcttaacccactcacttgtgcctgtgtcctgaattctttctctgcacacgtcaaagaaccccagggtatataacccagacagcgtagcgggttcagtgttacccttggcagagttctaacaggaaaaggacagggatccttcaacttacagcttcccgcttaactatatagcatgcctctcactgctgggatttctgctgggagggagggtatcaagacacttttgtctcagcacttctcactcttccattcctgttcctttctttctttttcttttcttttttttttttttgagacggagttttgctcttgttgcccaggctggagtgcaatgatgcaatctcggctcattgcagcctccgcctcccaggttcaagggattctcctgcttcagccccccagtagctgggattacaggcgcccaccaccatgaccagctaatttttgtatttttcgtagagacggggtttcaccatgttggccaggctggtctcgaactcttgatctcaggtgatccacccgcctcagcttcccaaagtgctgggattacaggcgtgaaccaccatgcccggctcattcctgttcctttctttatcccatgagccagcaggactaggagaattctgtgcaaaaggaagcaacaagaaacaattttcacctacatgaaagtctgggctggcatgtcatctctgttctgcaaaatctttaggagccaaaattctttcactgaagtgcctccgacacatcaaaggtgatgcccttgtctgcaaagtacaaagtgacacaccaccatggctgagttccaggaaacaggaaggtcaaaaagtgaagggaagcaactatccttccttttcaaggaagtgcttgcgctaataaattccgcttacaacccattggccaggactttgtcacatgactcaggcaagggagactgggaaatgtagtcttcattctgattagccatgtacccagctgaaactccagggttctattactatcagtaacagaattttgtgcctcaagtgcaaatttcaagggggcatctcaaactgtcattgtcaaaataaatgatattctcaggcaacattttaaaaaaaatctaaaaagtgaaggtcaaaaaaattcatgatgaacaaattgcaaagatgttttaaagatcagatccaaccctacacttctacaatctgcttcatttttttccaccttcattctggtcttgcagcccaaatttgcattctggctccaacacttaccagctgtgtgacctgcagcaagtgatttaacctctctgtgcctcagttccctggaagtaataaaagtatctcacaggcttgctatgaggttggaaggaattaatatttgtaaactgtttagcaaagagccagtacgtagtaaggaactggtgagaactattactatcattgctactactgaaacggcctccttgtctggagtaacacccgaggttcacagtctcacagccaaggaaaacaaggacatagacatagaaagagtgaggtcgagaatggaagtttcataggcgaaagaaagaggagagctctctgctgcagagaggggtcccggaaaaatgggttgccgtatcagcggggaaatgtagggggttttatagagaagctagtgagcaaacggtgtttgatttatatagggtgtgaaaaactggttagaccatgtgtcgcatttgcatagggtgcaaatttctggtagcctctgaccctaatcttttattatgcaggcaggttctctgcccgagctgcgccatgttgcccatttctgttactgcacgcgtggtaacataaaagggaagaggaagcgtccatgtagggcctgcctggcccctgggtagctctcttctattggcgcacctgccggcattctcccgtgtaagcttccagctgtgcctatctatgtttgcagctcaatttttcaggctgctgcttgttagaaaagaaatgatttgggggctgctttttgttagaagggaagctctgccgaggactctgctgccttcactatctgcctaaataatttctttctacctcctgtatcactacgactgttgctattattaatctgagaaagagactcactctgttgcccaggctggagtgcagtggcctgggctcactgcaacctccgcctcccagggtcaagtgattctcatgcctcagcctcccaagtagctgggactacaggagcctgccattatgcccagctaatttttttgtatttttagtagagacagggtttcaccatgttggccaggctggtctcaaactcctgacctcaaataatgtgcccgccttggcctcccacagtgctgggattacaggtgtgagctactgcgcccggcctcttattattatttatttattattattactgcttttggagacagggtcttactctgtcgcccaggctggagagcagtggtgcaatcatagctccctgcagcctccagttcctgggcttgagtgatcctcctgtctcagcttcctgagaaggtgggactacaggcatgcaccaccacactcagctattttttttttttgagttggagtcttgctatgttgcccaggctagagtgcagtggtgcaatgtcggctcactgccagctccgcctcccgggttcacgccgttctcctgcctcagccttccgagtagctggaaccacaggtgcccgccacctcgcccggctaatttttttgtgtttttagtagagacggggtttcactgtgttagccaggatggtctcgatctcctgacctcgtgatccgcctgccttggcctctcaaagtgctgggattataggcgtgagccaccgcgcccggcctcacattcagctaattttaaaagtttttggagagatgggctcttgctatgttgctcaggctggtcctgaactcttggcctcaagtgatactcccaccttggccttccaaattgttgggattccaggcgtgagccaccacccctggccagactttacacaataaaggtgtatttagggctgctctgcctatggagtggccattctttactcctttactttctgttttgtgtttgtttgtttgtttgtttgtttgagacggagttttgctcttgttgcccaggctggagttcaatggcgcgatctcagctcactgcaacctttgcctcctgggctcaagtgattctcctgcctcagccaccagagtagcagagattacaggtgcctgccaccacacccggctaattgtttgtatttttagtagacatggggtttcaccattttggccaggctggtctcgatctcctgacctcaggtgatctgccccccttggcctcccaaagtgctgggattacagctgtgaggctaacactcctggcctattcctttactttcttactaaacttatttcacttaaaaaaaaagtttattttctactcacacaacattcagatcagcaaggggttctgcccatggtaggctgaaataggcttcttccttttttttttttttttttgttgagacagggcctcactctgttgttcagggtgcagagccgtagcacaatctcggcttaatgcaacttctgcttcctgggttcaagtaatcctcctatttagtcccccaaatagctgggaccacaggtgcacggcaccatgcccgactaattttttttttttcattttcaacaagtgttttgtcaccaaacattaaaaacctacacaaaatacaggccaggtacagtggctcacgcctgtaatcccagaactttgggagtccgaggcgggcagatcacctgaggtcaggagttcgagaccagcctggccaacatggtgaaactccctctctactaaaaattcaaaaattagccaggcgtggtcatgtgcaattgcagtcccagctactcaggaggctgaggcttgagaattgcttggacctgggaggcggaggttgcaatgagctgagatcatgccactgcactccagcctgggtgacgagagccagacttcatctcaaaaaacaaaaatatatacagaatacaaagatagtataatagacttgtcacccaggttgaacagctactagtcatgccatgtttgcttcatctatactttgacccatttcctaccccccaatttattagttttttgggttttctttttagataaaatgtatacatattgaaaggtacaatctgaactgtaccattttgacaaattaatacactcatatagacttcccccctttaaagaatagaattactccacttactaatcattaatgtacatataagttacgtcgaagtagtatttacaatccaaatttttataaaataggtcagagttttgactgagaatttttttttttttttgagaccgagtcttgccctgttgcccaggctggagtgcagtggtgcaatcttggctcaccgcaacctctgcctcccaggttcaagcgattctcctgcctcagcctcccgagtagctgggattacaggcttgcgccacctcgcctgtctaattttttgtgtttttagtagagatggggttttgccatctttgccaggttggtcttgaactcctgaccttctgatccacccacctcagcctcccaaactgctgggattacacgcgtgagccaccgcgcctggccgagaatttttatttttaaaaaagtagagatctgtagagcacacagtaactacaatgtctatttatctcaagtaaatacagtttgatgaataaaattaaggaaaattcacctaagatgaaaaaaaaacaatcaaaccatctgtgcaatatgctatctgtaggagcatttggttaagaataacaaactaacccaacaattttattattttaataaccaaaattggcacaaatttctactattgttttcatagaaatgctccctcacaataaaaaaattttcatatcatgagagcaaaaacagcaaatatttgaaaaagtagatgtcttataaaattaagtagcaaaggccaggcgcagtggctcatgccagtaatcccagcacttcgggaggccgaggcgggaggatcacctgaggtcaggggttcgagactagcctggccaacatggtgaaaccatatctctactaaaaattccaaaattagccagacgtggtggcgggcaggagaatcgcttgaatctgggagacagaggttgcagtgagccgagatcttgccactgtactctagtttgggtgacaagagcaaaactccatctcaaaaaaaaaaaagaaaaatcacagttacctataattcgatcattcaatcaatcatcagataactcagctcattcaattatctgcaagtgtagataattctcatagcttcctattaaaattatgttttatgcccttacaaattttaacttagtttttcttttatttatttattagtaggagtctcactctgtcgcccaggctggagtgcagtggcacaatcttggctctctgcaacctccacctcctgggttcatgcaattctcctgcctcagcctcctgagtagctgacattacaggcatgaggcaccacacccagctaatcccacagtgcagggattagaggcataagccacctccccctcctactttttcttcttacttggtccgagggctgtgggacggggccccaccccagcccatcaccagagacttttggtcttggccatgtgtcctaagacttaatagttcttgcacattctcttggtaatcaattcaatttgtttcttccaaatcttgcagtaaaactgatgttccagccaggcgctgtggctcatgcctagacggttttcatcttgacatgacccttgtgctaggagtgtaaagtagaaaaccacagatggatacacatcattgccagtcccttttcactaaccaaagcgtgtcagtgaccctgcttaactttagtgggtgcagggaagtggcatgcttgcaagagtcagaaagaaagctgaaaatactaggtggagaacacgaatcgctatcaaaacccacccatttgatcacagaaactcagctcatgctccttcctgcttgcaaaatacagtcacccctccaagagagaactccatagtcccacctgtaatggcatcaagcctctttttctttccatgtggtctgtgatcattcagtagcctagccaagcttttttttttttttaaaattactgaacatatatttctgagttcctgctgtttccaaggtattaatacaatagtgcagaaatcaaagttcctaccctcttggagattgcatttgatgagttcccatttgtgtcaggccaactttcttgcattctgtttttattttaaaaataaatatggtctcaaaaaacaaacaaaaacaacagcaacaaaatggtctcagttaatattccaacagccctgggagataagtagtattatcttgagatgccttttgtgaattttcagcaacaactagaattttaaaaacaatccatagatatttccataacgtacgtatatgaaaggacacagtgaacaatgataagaaaacttaggttttaaaaaggttaagtaccttattaaaggtaaaagctggccaggcgtggtagctcacgcctgtaatcccaaaactttgggaggctgaggcaggctgatcacttgaggtcaggagttcgagacaagcctggccaacatggtgaaaccctatctctactaaaaatacaaaaattagccaggcatgggggcgggtgcctgtaatcccagctacttgggaggccaagacatgagaatcacttgaaaccaggaggcggaggttgcagtgagctgagatcgtgccactgcactccagcctaggtgacagagtgagactctgtctcaaaaagaaaaataaataaataaataaaaataaataaataaagcaaagccaaaattcaaaactcaaactttattttgactccagagttccttttatacaataccttttcctctgaagtcatgccccagctgatatcacagtcaaaatacattttaaaggatgagtgggacagaggtgtaatggggaaaaggtactagtcaaaactttttaaaaaataggcttttatgggtgtggtggctcatgcctgtaatcccagcaacttgggaggctgaggcaggagaattgcttgaacctgggaggtggaggttgcggtaagccaagatcgctccattgcactccagcctaggcaacaagagtgaagctccgtctcaaaaaaaaaaaaaaaaaaaaaaagtctttttagagcagttttagtttcgcagcaaaattgagcagaaaatacaaaaagttcccacacacccctagagccccctgctccacaaacaatcccattgttaacatcccaccgcacccggccggctctgtgtatttgtcttcacttttttcccctgcttcttggatttgctaactttatggttgccttatcttcaagtttgttgatcttttttctacctactcaaatctgttcttgaattcgtctaatgaattatcacctccattattgtaactttcagctccagaattcctgtttgtgaatttttaataatttatttctttctattgacattctcacttctttcatatatcattctcatgatctgctttagttctttgtccatattttccttcatctcactgaacacattggagacagttgatttaatgtctttgactaatagtttcaatgtgtgggcttccctagtaacagtatatgttaaatcatggtttattgtaaatgagttatactttcctatgtctttatgctttgtaattacaactggacatcctgagtattatgattcataagtctggaactccgatgctccaagtcttcatggattgctgatttctgcttactgaaggctgaaactattcatttctgacttttcccgactgttttttggcaactgtgtatcctttgggtgtgatcactgaagtgtcttttccattttgtggtcagttagtaacatgacaaagattttacaaggcatcgaacctctaagtctgagggatacgaagggactcaagagagccaaaacaagcatcttattggcttctcaggaattgccagacctagtagagtgcaaattccccaaattttggaggccaaggtctcaactgcctgctctggcactggtcacctgtttgaggaaaatggactgtctccaaattgccccactcggacggaggaatggggagtgggggctggtttgtgaaggctgttctctttctaaagtctcagtctctcttttcatcaagcactcctctcattattataagtgctgcaacaggatgactagttctgaaatcattgattctgtgtctcctgcccctcagttcactgtttatttcactggagggaggggctcccagagctttctactccgtctttttgcttgatctcactgtttgctgactttctgagatatgcccaaactcatatggctattggaaatttccacattaaaagtacttcaccacattgggcaacatggtgaaatcctgtctctacaaaaaagaaaaatacaaaaattccttgggtgaggtggcacactcccgtagtcccagctacttgagaggctgaggtgggagaatcgcttgagaccgggaggcagaggttgcagtgagccgagatcgcactactgcactccagcctgggtgacagagtgaggctctgtctcaaaaaaaaaaaaaaaaaaaaaggtacttgacatgatagtttccaataaaaacattttaacctaattccttcatttcactctttagcaatcaatatgtgaaaattatattgaactggtaaaaatgcaggttacaaagataagataaatatgaaatgctatgatacacttctgaccactggaagacataagagagagttgcaatgattatatttaatattttggttagtaaacagagagaacgcatctacccagggattcagtaggggtatgtgaagatttaataaggtaagtaatccttagtttttgagaaaccagagatagaaaatatgttggtgatttttttttttttttgagatggagtctggctcttttcgcccaagctggactgcagtggtgtgctctcagctcactgtaacctctgcctcccgggttcatgccattctcctgcctcagcctcctgagtagctgggattatgggtgtgtaccaccacacctggctaattttttttcttttttgagacggagtcttgctctcttgcccaggctggagtgcagtggcgtgatctcggctcactgcaagctccgtctcccaggttcatgccattctcctgcctcagcttcccgagtagctgggactacaggtgtctgccaccacgcccggctaattttttgtatttttagtagagacggggtttcaccgtgttagccaggatggtctcgatctcctgacctcgtgatccgcccgccttggcctcccaaagtgctgggattacaggtgtgagccaccgcgcccggtcaattttttttttttaactttaagttccgggatacatgtgcagaacatgcaggtttgttacataagtatatgtgtgccatggcggtttgctgcacctgctgacccgtcctctaagttgcctcctctcacttctcaccccccaacaggcccgatgtgtgacgttcccctccctgtgtccatgtgttctcattgttcagctcccacttatgagtgagaacatgcggtgtttggttttctgttcctgtgttagtttgctgagggtgatggtttccagcttcatccatgtccctgcaaaggacacgatctctttcctttttatgactgcgtagtattccatggtgtataggtaccacattttctttatccagtctatcatcgatggacatttgggttggtgccatgactttgctattgtaaatagtgctgcaataaacatatggtgcgtgtgtctttatagtagaataatttatgttctctttttttttttttttttgagatgaagtctcagtttgtcacccaggctggagtgcagtggcataatcttggcccactgcaacctccaactcccgggttcaagcaattctcctgcctcatccttccgggtagctgggattgcaggtgcccaccaccatgcctggctaatttttgtatttttagtagagatgatatttcgccacgttggaccaggctggtctcgaactcctggcctcaggtgatctgctcaccttggcctctcaaaatgctgggattacaggcgtgagccgccacacccggccaggattgttattactacttttaacccatttcccatttgccccgagaatactcttgtctctaatcccaatgtaacatcatatacatttctgctacattaggattagagacaaattctgttcagaaataactccaagaacagtttttatattttatttgcacattgaaactcaaccagatttgcttcagcctcaacaagtgtgtttatgtaaagttaaatgaactctggcagtgagctgcacgttttttaaaattaggaaatgagttagctaatattgaacttgaggttttagtcaatgcaatgagacaaaaagattgaataggaagaaatgagtcattatttagagattacttcattatgtatgtagaaaattctaggccagtcattgtggctcacgcctgtaaccccagcactttaggaggccgaggtgggtggatcatgaggccaggagatcgagactatcctggctaacacggtgaaaccctgtctctactaaaaatacaaagaactagccgcctgtagtctcagctacttgggaggctgaggcaggagaatggcgtgaacccaggaggtggagcttacagtgagccgagatcacaccactgcactccagcctgggtgacagagtgagactctgtctcaaaaaaaaaaaaaaaagaaaattctaaataatctacacatagttttatttttacttttgagatggactcactgtgtcgcccaggctggagtgcagtggtgcaatctcggctcactgcaacctctgcctcccaggttcaagcaattctcctccctcaacctcccaagtagctgggacaacaggtgctcaccaccacacccagctaattttttctgtagttttagtagagatgtggttttatcgtgtaggccagggtggtctcaaacttctggtctcaggtgatccacccatctcagccttccaaagtacttggattacaggtgtgggccaccacgcccaacctacacatagttttttttttttttttttttttttgagacagagttttgctctgttgcccaggctggagtacagtggtatatcttggctcaccacgaccttctcttcccgggttcaagcaattctgttgcctcagcctcctgagtagctgggattacaggcatgcactaccacacccggctaatttttgtattcttagtagagatgaggtttcaccatgttgcccaggctggtctcaaactcctgacctcaggggatccgcccacctcagcctcccaaagtgctgggattacaggcataagccactgcgcccggcctacacatagttttaatatattgatttagcaacaacaccggaggcaaagccaaagtacaaaaataaatcatatttttatataccactgtcaactagaaaagacatgtaaaactatgtcatttacaaactcaacaaaaatatatcaaatacctgggactacatctaatggaagcactatataaattctacaccaaaaaccataaaatgttactgagaaaattaaagaaagcttaaataaatagaaggatataccatggccaagaggttggaacatttaataccatgaagacaccaattctacaccaatatctattgatctatagattcaatgcaatcccagtcaatacctcagcaggaagtatacgtgtgtgtgtgtgtatgtgtgtgcgcgtgagagagagagaggagagagagagagagagactgattctaataaaaacacagggaaatgcaaagaactaagaaagacaagatgatctgtaaaaagaacagaatggagagactctactatatattgagtcttattaaaaggctacagcaagttaaacagtgtggtattagtgccatcagggactacaatccagtgggattataaaaataattgcttggccgggtgcagtggctcatgcctgtaatcccagcactttgggaggctgaggcgggcggatcacgaggtcaggagatcgagaccatcctggctaacacggtgaaaccccgtctctactaaaaatacaaaaaattagccgggcatggtggcgggcgcctgtagtcccagctacttgggaggctgaggcaggagaatggcatgaacctgggagacggagcttgcagtgagccgagatcatgccactgcactccagcctgggcgacagagcaagactccttctcaaaaaaaaaaaaaaaaaaaaaaaaaaaaattagctgggcgtggtggtgtgcacctgtaatcccagctactcaggaggctgaggcaggagaatcacttcaacctgggaggcagaggttacagtgagctgagatcgtgccactgtactccagcctgggcaacagagcgagactctgtcacaaaaaaaaaaaaattctgtaaggcaaaaagaaaaagacaacctacttttaaaagatataaaagatgtgaagcaacacttcacataaaataatatacaagtggacaatactagagagcatatttagctacattactccaaaaaaaagtaaaaccacgtggaatcccccttattcaacagtggaaattggcaagactgggcatgactctgagagtgagtcaacaatgtggcaggatatgtttcgaacctttatcctttcacagaaacattcatttcaataatcttctgtgcagaaaaatactttcacaagagtcaaagaatcagctgagagaccacagaacttgaatggaaaataacggtaagaaaagataggccgagcatggtggctcacgcctgtaattccagcacttttggaggccgaggtgggtggatcacctgaggtcaggagttccaaccagcctgatgaacatggagaaaccccatctctactaaaaatacaaaaaaaaaattagccagacgtggtggacgcacctgtaatcccaggtactcaggaggctggggcagaagaatgtcttgaaccgggaggcagaggttgcggtgagccgagatcgcgccattgcactccaacctgggcgacagagcgagactccatctcaaaaaaaaaaaaaaaaaaaaaaaggcaaaaagaaagaaaaacaagaaaaagaaaagaaaagatgtactgaagatggtaggaaagagtttcacttgatctgcatcatccccttcctgaacccaaggcagcacagagagagaaacccacttcatgggggatggagagtaaagtgagttcctggctgcactgcagacctgagcccgagttccactttagcgaacacggatacaggctgtccagagaaaagcaagtggaaactacagaaactgttgtagaacttttacttgctggtctggtcttggttgtatccatctttggccagtcacatatgtactcaagaaaccttcccaatagagtacaacaggatgagactctgaaatccctttcaatattccctgctagatattgattgttatatcaagcattaagtgtaaacttttaatggacaattagtgtaactgtggatggcatctgcttttgtttttaattctgtggattgtgtttaagcaattcaatagtatgttcctgattttgagatgctaagtggtattgcacagatgtcattttatccagcatgtgcaacagtcccatgaagtttatagagcatacccttgtatagcttcaggtgctagaattaaaattgatctgttatcacacacacacacacacacacacacacacacacgcaatcattcatgtggactcaaactccagttccatcccaggggatccaggcaccaggtcagcccctgtggaaccaggtgccaagcctcctctcttgctgaaataggcaccaggcaatccctctcaaggactccagcgagaagtccaccagcaactccccaccaaacaggctgcctagaatctctagataggctgactggcaaagtgcttttcctgctaaagccagtatgtaaagaactgactacttcaaatgcacagacactaatgcaaggccataaggatcatgaataatcagagaaacatgacatcaccaaaagaacaaaataaagtatgagaaactgacacaaaagaagtggacatcaacgaactccagatgaaaaattcaaaataatcatcttaaagaagctcagtgaattataagagaacacagagagacaactgaatgggaaacaaaacataatgaaatgacaaattcaacaaagagatagaacctatatttaaaaaaggactaaaaagaaattctggagctgaagaaaacaaggactgaactgaaagtctccatgaagagcttcaacagcagatgtgatcaagaagaagaaagaatcagtgagctcaaaggcaggacatttgaaattatccattcaaaggagcaaacataaaaaagaataaataatactgaaaaagctcaataggcttatgagataccattaagtgaaccaatatatgcattatgtaagtgctccaaaaggagcaggaaaggtgaaaaggagagaaaacatatttacaaaaacaatgatagaaaaattttgaggccagccgtcgtggctcatgcctgtaattctagcactttgcagggctgaggcaggtgggtcacttgaggtcaggagtgtgagaccagcctggccaacatggtgaaaccctgtctctactaaaaatacagaaatgagctggaggggtggtgcacaccaatagtcccaggtacttgggagactgaggcataagaatcacttgaacttgggacgtggaggttgcagtgagccaagattgttccactgcactccagcctgagcaacagaatgaaactctatctcaaacaaaaacaaaaacaaaccccccaaaatttccaaatctggaaaaggaaaaatgaatatgaagatccatgaagccccaaaaaccccaaatagggttaaggtatagagaacgtcactgagacacattgtaataaaattctcaaaaatcagagataaaaagaatttgaaagcagcaagagaaaagcaactcatcatatacaacagaacctctattcaagtattagagattcctcagcagaaacattccaggccaggagaaagtgggatgatgtattccaagtgccaaaagagaacaaaaacaactgtcaatcaagagtactataacagcaaagctatcctttagaaataaaaataagtaaataaaaactttccctgataaacaaaaactgagggagttcctcaccacttgacctgcatgacaagaaatgctaaaggaaattcttcagtttgaaacaaaagaatgccaaataaaaatatgaaaacaggccaagtgtggtggctcacgcctgtaatcccagcactttgggaggccgagggcggatcacctgaggtcgggagttcgagaccagcctgaccaacatggagaaactccgtctctactaaaaatacaaaattagccaggtgtggtggcacatgtctgtaatcccagctacccgggaggctgaggcaggagaattgcttgaacctgggaggcagaggttgtggtgagccgagatcgtgccattgcactccagcctgggtaacaagagtgaaactccatctcattaaaaaaaaaaaaaaaaaagtaaaagtataaaactcactgtaaaggtaaatatagagtcaaattcagaatgctttaatactgtaatggtgtgtacagatcattttaaaccgtagaataaaaagcaaaaatattttaaaactatacagtaatgttaatggatacaaaatattaaaatatataaaatgtaacattaataacatataagagggaagtacaagtgtagagttttttatgtgatcaaaattaagttgctagcaacttaagatgaactgttataactataagatgcttatgtaaacctcatggtaaccacagagaaaaaacctgcagtagatacacaaaagagagacagaaagaatcaaagcttatcactaccccaaatcatcaaatcacaaaagacattaagagaggaagaaagaaatgaaggaactacaaaaacagtcagaaaaagatatggaaaacagaaatagtaattacctatcaataattatttcaaatgtatgtggattaaattctccaaccaaaatatgtaaagtggctgaatggattaaaaaaacaagagccatctatatgctgcttacaagagactaattttacttttaaggacatatatgggctgaaagtaaaaggatggaaaaagatataccatgcaaatggtagccaaaagagagaaggggtaactgtatttatatcagacaagattagcttttagtaaaaaactgtcacaagagacaaaggaggtcattatatagtaataaagaggtcaattcgtaaagatgatctgccaattataaatatatttgcatccaacattggagtttctattatataagcaaatattaacagatgggaagagagagatagatagcaatacatactaatagaggaatttgataccccactctctatgatagatagaacatccagacagaaaatgaataaggaaacagtagacttgaataacactgcagaccaaaggaccttgcagacatatatagaacatttcatcaaacagcagcagaatacacatttttcctccaaatacacatggaacattctctaggacagatcaagtgttaggtcacaaaataggtcttaacaagtttaagaagactgaaatcatatcaagtatgttttctcaccacaatgatacgaaactagaaatcaaaataggaagaaaattagaaaatgcactaatatatgaaaattaaacaacacattcctgaacaataaatgagtcaaagaagaaataaaaagagaaataaaagagtagcttgacaatacaaaaatggagaaagactgtatcaaaatttatgggaggtagcaacagcagttttaagagtgaagtttatagcaataaatgcctacattaagaaaagagaggccaggcacgggtggctcacgcctgtaatcccagcactttgggaggcctaggtgggtggatcatgaggtcaggagtttgagaccggcctggccaatatggtgaaaccctgtctctaataaaatacaaaaattatccgggggtaatggcatgcacctgtagtcccagctacttgggaggctgaggcagaagaattgcttgaacccaggaggcggaggttgcagtgagctgagatcatgccactgcactccagcctgggcgacagagtgagactccatctcacaaaaaaaaaaaaaaaaaagagagagagagaaagagagagaaaagaaagatctcaaataaacaacctaagtttatacttcaaggaaatagacaaattaagcaaaagttagtagaggaagaaaataacggagcaataaataaataaaatcgagactacaaacgcaatagaaaagatcaatgaaactaagagctggttttataaaaagataaacaaaattgacaaaactttagctagactaagaaaaaagagaggagactcaaaatcagaaatgagaggacacattacaactgatactactgaaatacaaaggattataagagactattatgcacagttatacaccaacagattgggtagcctagaagaaatgataaattcctagaaacacaaacctaccaagtctgaatcatgaagaaattaaaaaagatctgaacagaccaataataaattaggagatggaatcagtaatcaaaagtgctccaacaaagacaagtctgtggccaggtggcttcactggtgaatttcactaacctttaaaagaaaaattaacactaatcttctcaaactattcaaaaaattgaagaggtgggaatattatcaaactaattttacaaggatagtattactctgataccaaagccagaaaaagcactagaagaaaagaaaattacaggctaatatcccttagaaacacaaatgcaaaattctcaacaaagtactagcaaacctaattcaacagcacattaagaggctcattcaccatgatcaagtgggatttatccctaggatgcagggatggttccaaatacagagattaataaatataatacaccatattaacagaatgaaggataaaaattatattatcatctcactagatgcagaaaatcatttgacacaattcaacatcctttcacgataaaagctagcaacaaagtaggtatagaaggaaggtatcttaacataataaaggccatatatgataagcccacagccaacatcatactcagtggtggacaagtgagtccactctcaccacttctattcaaaatagtactgaaagttttaggcagagcatttgggtaagggaaagaaagaaaagaaatttaaattggaaaggaagaggtaaaattacctctgtttgtagatgtcataatcttatgtatagaatttttttttttttagatggagtttcgctcttgttgcccaggctggagtgcaatggcattatcttggctcactgcaacctccacctccttggttcaagtgattctcctgcctcagtctcccgagtagctgagattacaggcatgcgccaccacgccgactaattttgtatgtttagtagagaccgggtttctccacattggtcagggtggtcttgaactcctgacctcaatgatccgcctgtttcggtctcccaaagtgctgggattacagatgtgagccattgcacccagcctagagaatcttacagatgccacaaacaaatctcttagaattaataaacaaattcaattgcaagattcaacatcaatgtagacaattcagtgtgtttctacacactgacaacaatctatctgaaaaaataatcaataaagcaatcccatttaaaatagaataaaaaatgctcaggaattaatttatccaaggaagtaaaagatccgtttacaaaaaaaaaattgatcaaagaaattgtagaagacacaaatgaatgaaaagatatcccatgttcatggattgaaggaattaatattgttaaaatgtccatgctacacaaagtgatccacagattctatgcaaatccctatcaaaatttcaggggtatttttcatagaaatagaaacaaaattctaaaatttaaccacaaaagactttgaataataaacacaattcagcaagaaaaacaaagctgaaggcatcagttctggatttcaaactatattacaaatctatagtaatcaagacagtatgttactggaatgacagcagacacacagaccaatggaacagaataaaaagtccagaagtaaactcacacatgtacagtcaatgaatttcagacaaaagtgctgagaacacacaatgggaaaaggagagctctttgataaatgatgctgggaaaaatagatatccacatgcagaagaatgaaattagaccctcatcttgttactgaaacaccagggatatggtctaggtctgctgcttgccacacagaaagccaatggctgaggtgatgagtattgccagggaagaaggctttaattgggtgctgcagctgaggaggtgggagatcagtcttgaatccatccccttgactgactaaaattaggggtttatgtagctgggaagaaatgtaatgatgtgtgggaaaatgggaacttgggaggcataaggaagtaatcgtgatgaatgaggggtctggatgtgatgatctggtgagtttcagttctttgatattttttgagatgcctgggttggggtggggaggttccttcttgaagaagaagaaattcagataaaacaaacataagtttcaaggtttaagactggaagtgtccatttctatttatcaaaaacaaaacagtctatgggactattgggtcagtttcagtcccctctatttatcaatttttttaatcatggggaatctgaccattgatctttctggctgcttcatgctgaggaggtgaccatgtggccaccttctgaaacacaatcattctctgtccagccaccactgcccccaccaaagacaagtcaaagcaggatgaacctacctgcaaaataagcttcagtccatggctgggcatggtggcttctgcctgtaatcccagcagtttgggaggccaaggcaggtggatcacttgaggccaggagttggagacccaggagatggaggttgcagtgagccagtctgggtgacagagtgagactctgtctaaaaaataaaaaataaaaaagctttggtcccatatacttggcctgattacccccaaaaagtgcagcaaaaatcattgtccacatagatccttctaaattggccttgctggaacctcacactgttccattataaaagaaaataggttcttactcaaattatgccaagaaacacattgacatatcagaattttaggaatctcatacaatcctagaacatatattaacaactcatctatataaatataaccctaagggccaggcgtggtggctcacgcctgtaatcccagcactctgggaggccgaggcaggcggatcacgaggtcaggagtttgagaccagcctggccagtatggtgaaaccctgtctctactaaaaatacaaaaattagccgggcatggtggcacgtgcctgtaatctcagctacttgggagggtgaggcagaagaattgcttgaacctgggaggcagaggttgcagtgagccaagattgagccactgtactccagtctgggcgacagagtgagactccatctcaaaaataaaatataacccgaaggaagctaaacaccaccttggatctgacaatgtttcctgcatgattctaaaataacaaattaacctaagatatctctcttggacttgagggaacctaatatccaaaaaagttagtttgaggtcaaaaagactgaatttagacctttaaattgtgctcctagaaattttgccaattacaaaaattttaaaacacttgatatcacaaaacatgatcacaggtcacaataaaatagtcatttatggccgggtgcagtggctcacacctgtaatcccagcactttgggaggccaaggcaggcagatcatctgaggtcaggtgttcaagaccagcctggccaacattgtaaaaccgcgtctctactaaaaatacaaaaattagccaggtgtggtggcacgtgcctgttaatcccagctacttgagaggctgaggcaggagaactgcttgaacctggaggcagaggttgcagtgagctgagattgggccactgcactccagcctgggcgacaagaatgaaattctgtcccaaaaaaaaaaaaaaagaaaaaaaggaaaacacaagtcatttatttagccaaaatgataaaacaaaaatatttaccttttaataggagatacagtttctcaaacaataagacagcatgagaccaaacaaatctgtccctctccaatccattttttccctccagtttacttaaacaaaactattttctctcttattaatattatacaaattttgttcaaaagagaaaacccaaattttacctttatatggtgtatttattaatgttaaagataattttaataaaactttatcaataaatctatctaattttcattggtttgaccatagggtaagattttgataaactttttataagctttcatgattttctattaaaaagaacagatcaatgctccacaaaaacccttactcctgacacatgggctcagaccctcaccttgcatcagtgtgcttttgatattaacgtttaatttataagaaaaactctgaactaattttatccctcaaaattggcccttataatctcacacacccacctcatccgtgatagttcctgggcctagagggattgaatagttttggttttttttctttttttttttttgagacagagtctcgctctgttgccaggctagaatgcagtggcacaatattggctcattgcaacctctgcctccccagttcaagcgattctcctacctcagcctcctgaatagctgggactacaggcacccgccaccactcctggctaatttttgtatttttagtagagacgagatttaaccatgttggccaggatggtctcgatctcttgccctcgtgatccacccacctcagcctcccaaagtgctgggattacgggtgtgagccaccgcacctggctgaatagttttaatttctagccctgtgtctcatgaaaacagttcattttgattgtcatttttccctggatctgaagacaagacttccactggttttgatgttcaagacttagcaggggtcagtgcctttttcagacccaggagtcaaagttgtgaaacttaacagcacaaggattagttaatagggtatttatactaccaaaaggcctgtcattctaacatgccacacattgaaacgctgtgatttggtgtctaggagttactgcttgcagcacttcaaaccactgtattaaagtaatcaggttactcattgcatatgtccaattgctagcattctagtgacagaactgtgaccaaaagcataaaaaatgtggtaggtgctaagtcaaacttatcaaagtaagacaactacctttttccccatcattaaaaaaaaaaatagtaaatgcaggccacgcatggtggctcatgcctgtattcccagcactttgggaggctgaggcaggcagatcacttgaagtcaggagttcgagaccagcctggacaacatggtgcaaccccatctgtactaaaaatacaaaaattagctgggtatggtggcatgtgcctgtaattccagttactcgggagactgaggcataagaattgcttgaatccaggaggtggaggttgcagtgagccaaggtggtgacagtgcactccagcctgggtgacagaaactctgtctcaaacaaacaaacaaacaaacaaaacaaacaaaaaataccccaaaacaaacccacgtgatgaatattttgtttctgacacacaatttaatgtctttaagtccaccaataccactgtatgttttgtgcaattaagaaattcactttaggctcatgatcagtaagtactttagtgctagtgctatctatgcagaagaacaaatacagtgagaagcaaagcaagtctttacagaaaatttggcttcacagaaaatctggattcatacttaactatatgaaaaacggattgccaaattgccaatgtatttctttacaatatttcttaattttccttcatcaagactaagagctttaactatgaacaacattaattagccaaacttctccaattttctatcaggttttaaaggatattctacatctaaatattttaaactttgttttctctgtgtatgcataaaggcagacatacagagagagaggaaaaaaactacatatgacatacacagaccatctatgacatgcttgaaccttcagtttgttctaaatttattttcttattccctcccttccttccttccttcccccttcctttcttccttccttccttctttcccctgcctccctccttcctttctttctttctctttcttttcttttttctctttctttctctcttttctttcttcctttcctctttcttttttctttctctctctgtctccccctcccttgcatcccctcccattgtcttctttccttctttccttccttccttcctttcttccttccttcccagtcattttactttaagacaaaaattcaccatacaagatcctttctcatataaaattattccttttttttttttttcttgagacggagtctctctctgtcgcccaggctggagtgcagtggtgtgatcttggctcacttcaagttccacctcctgggttcatgccattctcctacctcagcctcccaagtagctgggactacaatcgcccaccaccatgcccggctaatttttttgtgtgtttttagtagagatagggtttcgctgtgttagccaggatggtcttgatctcctgacctcgtgatccgcccatcttggcctcccaaagtgctgggattacaggcgtgagccaccgcacccgacaaaattattctttctttataaccttccttaccaaaaatacatcttcatatccataattttcttcacatctcactcctttacttattggttcctttcttttcaagtccataatttgaattaacctttagataacttctgaatttgataataatttttttctcaataagaacatctcttctttggcatattttatatgcagaattatatattaactagaattcttatccttagtaacctcaaattttagtgaaaacctaggaagaaagaaatcctgagctacctatcagatattagcattttataatgagaactcttccataatttttagaaacatatttccccatatcataacccttccttaattagaaatgacccagacatctaataagcataattttaaatattattcttaaacataattttaagattttaagttacacaataagttcacctgcagcacttaacccatttacactttatttttagcagtttatatagattatttacacattattttcttgttaacccttttataacttgtgaatatcagatgttcacctaaataagaaccttaaagttaactgcatgggcattttcaccaataactcagtagactcaggtgttttcattaaaccaataacattaaatagtcttacttatataaaaaaaaacacaaaaagatcattttgttttggctgggtttatggtttgataaccttctatgccaaaccctgatacctcaaaatatctagaagagacaaatatgaaacccagagaaaaatgtatgctgacaattctgaagacatttctattcctattttaccaataatttaaaaaccaccttgttggccaggtacagtggctcatgcctgtaatcccagcactttgggaggctgaggcaggtggatcacttgaggtcaagagctcaagatcagcctgaccaacatggagaaactccatctctactaaaaaaaaatacataaattagccaggcataattgcacacaactgcagtcccagccactcaggaggctgagacttgagaatcgcttgaacccaggaggtggaggtggcagtgagtggagatcatgccactgcactccagcctgggcgacagaatgagactctatttcaaaaaaaaaaaaaaaaaaagcttgctcattaaagacttacttaagtcatataaacttgaaaaatactttggacttaattaatgagcactcttttatttataagccaaattggtaggcataacatataacaataaatatacatacatatacacacatctaaatatgtactcacacacagaaacaaagatccaatagcttttactttggaattctagttgggaggctgaggcaggcagatcacctgaggtcaagagtttgagaccagcctggccaacacggtgaaactccatctctactaaaaatacaaaaattagccaggtgtggtgtcaggcgcctgtagtcccagccacttgggaggctgaggcaggagaattgcttgaacctgggaggtggagatcgcagtgagccaagattatgccactgcactccaggctgggcgacagagcaagactccatctcaaaaaaaaaaaaaaaaaaggaattctagtcatgagatagtaatacaaactcacctatctatgaacgtgttcacatggctgcattttgtctgctctgataggtaatcccatgaagactgttgtattcgtctgtcctcacacggctataaagatattgcctgagactgtgtaatttacaaagaaagggggtttaattgactcacagttccacatggctgggaggcctcaggaaacttacaatcatggtggaaggcgaatgggaagccaggcatgtcttacatggcagcaggagaagaaacagagacagagagagagacagagagacagggggaactgccacttttaaaaccatcagatcctgtcatgagaacagcatgggggcaactgcccccatgatccaatcacctccctctaggtccctcccttgacatggggggattacaattcgagatgagattatggtggggacacagagccaaaacatatcagctgtgagccaaaatttcgggtaaagtagtttccacggcagtttgattttttttttttttaagacgggagtctcgcactgtcgcccaggctggagttcagtggcgcgatctcggctcactgagagctccgcctcctgggttcacaccattctcctgcctcagcctcccgagtagctgggactacaggcgcccaccaccacgccaggccaattttttgtatttttagtagagatggggtttcaccatgttagccaggatggtctcgatctcctgacctcgtgatccgcccacctcagcctcccaaagtgctgggattgcaggcgtgagccactgcgcccggcccggcagtttgatttttagaagtcaaacctttaaacattggggtcaaacagaagaacatcacgtattaaccaggctgaaccctgcttagaacagcagcccaggctgggcgcagtggctcacgcctgtaatcccagcactctgggaggccgaggcgggccgaacacgaagtcaggagattgagactatcctggctaacatggtgaaaccccatctctactaaaaaaatacaaaataattagccaggtgtgttggcgaacgcctgtaatcccagctactcaggaggctaaggcaggagaatggcatgaacctgggaggtggagcttgaggtgagccgagatcgcaccactgcactccagcctgggcgacagagcaagactccgtctcaaaaacaaacaaacaaacaaacaaacaaacaaaacaaaacaaaacaaaacataacaaaaaagaacagcagcctaaaagcctgggtacatggaactccatcccacatgatccgcctgccttggtctcccaaagtgctgggattacaggtgtgagcccccacacccagccttggtgatgattttttggatttgacaccaaaagcacagagaacaaaagcaaaaataagtggaattgcaacagactaaagagcttctgccaagcaaaggaagcaatcaaggaaattaaaaggcaacgtatggatggagagaaaatatttgtaagccatatatctgataaggggttgagatctctaaaatatataaagagctcatataactcaacagcaacataacaaatagctcaatttaaaaatgggcgaatgatcttaataggcattcctcaaaagaagacacacgaatggctaacaggtgtgtgaaaacatgcccaacgtcattaatcatcagggaaatgcaaattaaaaccacagcgagatatgactgtggtgataattttagcatataggtgtatcaaagcatcacatttccttccttctttctttctttctttctttctttctttctttctttctttctttctttctttctttctttctttctttctttctttttctttcctttttttgagacggagtctcgctctgttgcccaggctggagtgcagtggcacgatctcggctcgctgcaacctctgcctcctgggttcacgccattctcctgcctcagcctcccaagcagctaggactacatgcgcccgccaccacacccggctaatttttcgtatttttagtaaagacagggtttcaccatgttagccaggatggtctcgatctcctgacctcgtgatccacccgcctcggcctcccaaagtgctgggattacaggcgtgagccactatgcccggcaaagcatcacattctcaccttaaatatacacagcttttatttgccagtgatgcctaaataaaactggataaaatatgggaaataataagatttggcagaatgagaaacaacagaaattctcacatttggctggtggagataatttctttctttctctttctttctttctttctttctttctttctttctttctttctttctttctctttctttctttctttctttcttttctttctttctttttttgtggagacaggatcttgctctgttgcccaggtggagatattttttttttctgtggagacagggtcttgctctgttgcccaggctagagtggagtggcaccatcatagctcactgcagcctcgaactcccaggctcaagccatcctccctcctcagcctcctgagcagctaggactacaagcccatgccaccatgccaggctatttttttttgtaatttttcatagagatgaggttttgccatgttgcccaggctggtcttgaactcctggcctcaagtgatctgcctgcctcggcctcccaaagtattggaattacaggcgtgagccatcgcatccagccatgattttcttaataagagtttctttcctctagcttactttattgtaagaatacagtgtataatacatgtaacatacaaagtatgtgataatccacagcttatgttatcagcaagtcttctggttaacagtctgctgagttaggctttgggggagtcaaaagttatatgtggccgtttgactgctcaggggttggtgcacctaagaccccacattgttcaaacgtcaactgtctatggaagaaaacgtttacgaaacatctcactttgactgttgtatgaagaatggcctgtagggggagccagtggatacagggagaccgagtaggaggctttttgcagacaagagacttaaagtgttagactctgatagattaaatatgtaaattaaaatttctaaaagtataggaataaaatgtataatttctgaactcagaagaaaaacgggaataagacaaaaatccgaaacaaggcaaggaaggagagaaacagaaatacggaagaggcaaataattcctccaaaaaattcaaaatgtatgaagaattgcaattaatgcagatggtccaaatctgtgctactcaataccatgctattccatgtcaatagccatatgttactatatggcacttggaatgtggatctgaactgaaatgtcctgttgtggccaggcgcggcggctcacgcctgtcatcccagcattttgaggggccgaggcaggtggactacttgaggtctggagtttgagaccagcctggccaacatagtgaaacgcggtctctactaaaaatacaaaaattagccagggtatgtagggaccagccccacagggtcggtgggtttttctccctgtgtgtgtgaggagatgagagatcgtagaaataaagacacaagacaaagagataaaagaagacagctgggcccggggaaccactgccaccaagacgcagagaccggtagtggccccgaatgccaggctgcactgttatttattggatacaagacaaggaggcagggtaagaagcgtgagccatctccaatgataggtaaggtcacatgagtcacgtgtccactggacagggggcccttccctgtttggcagccgaggcggagagagagagagaggagacagcttacgccattatttctgcatatcatatcagagacttttagtactttcactaattttgctactgctatctagaaggcagagccaggtgtacagtatggaacatgaaagcggaccaggagtgtgactgctgaagcacagcatcacagggagacagttaggcctccggataactgcgggcgagcctgactaatgtcaggtcctccacaagaggtggaggagcagagtcttctctaaactcctggcctcgagtctgctaagtagcccgtgttttcccttggcactgacgctaccgctagaccacgggccacttggcaacgggcgtcttcccagatgctggcgttacccctagaccaaggagccctctagtggccctgtccgggcgtgacagagggctcgcactcttatctactggtcacttctcaccatgtcccttcagctcctatctctgtatggcctggtttttcctaggttatgattgtagagcaaggattattataatattggaataaagagtaattgctacaaactaataattaatgatattcatatataatcatatccatgatctatgtctagtataagtattcttattttatgtattttctttattatactggaacagctcgtgccctcggtctcttgcctcggcacctgtgtggcttgctgcccacagggtgtggtggcgggcacctgtaataccagctacttgggaggctgaggcaggagaatctcttgaacctgggaggtggaggttgcagtgagctgagatcgagtcactgcactccagcctggatgacagagggagactccatctcaaacaaacatacaaacaaacaacaacaacaaacaaacaaagaaacacattaagaaatgcttagtggcccggcatggtggctcatgactgtaatcccagcactttgggaggctgaggcaggtggatcacttgaggtcaggagtttgagacaagcctgaccaacatggtgaaaccccgtctctactaaaaatatgaaattagcctggcgtggtggcaggtgcctgtaatcccagctactcgggaggctgaggcaggagaatcgcttgaacccaggaggcggagtttgcagtgagccgagatggcaccattgcactccatcctgggcaacagagcaagacttcatctcaaaaaaaaaaaaaaaaaaaaaaaaaaagaaacacttaaggatctggtaggaatgtaaattgtgcagctgctatggaaaacagtatggcacttcctccaaacattagaatagaattactatgatccagcaattctacttctatgtacatacccaacagaattgagagcagggatgagaacagatattgttacgtctgtggccataggagtagtattcacagtaaccaagatacagaagcaaccccagtgtctactgatggatgaatgcataaacaaaatgtggtatatccatataatggaatattattccgccctgaagaagaatgaagttttaatatatcctacaacatggatgaaacttgaagacattattctaaatgaaatgagccagctgcaaaagggcaaatactgttatgattccacttatatgaggaaatgatggagcaaatttatagagacagaaaggagaaaggtgggtgtcaggggctggggaggagggaatggcgagtgagtgtgagtgtttaatgagcacagagtttcagttttgcaagatgaaaaactttctggagatggacggtggtaatggttgcacaacaatgtgaatatacttcatatcagtgaagagtacacttaaaattgttaaaatggtaaatttttgtatttttagaagagacggggtttcgccatgttggccaggctggtctcgaacttctgacctcaggcgatccacccacattggcctcccaaagtgctgggattacaggtaaattttatgttatacatgttaccataattaaaaatagatgcatttttaaatgcttagggaatatttccaaagcttggccttatactgagtgataaatcacatcgctatcaaaggaattgatatcatatactctctctaagttactcatggaggatcagaggaggaataaaaatgtaattaggacagtatctagtttcttaatttatttttatttttaatttttatttttttgagagagtctcgctatgtggcccaggctggagtgcaatggtgtgatctcggctcactgcagcctccacctcccgggtttaagtaattctcctgcctcagcctcctgagtagctgggattacaggcacgcaccaccatgcctgaatagtttttgtatttttagtagagacagggattctccattttggccaggctggtctcgaactcctgacctcaggtgactcccctgccttggcctctcaaagtgctgggattacaggcgtgagccaccgcatccagcttggaatcttaatttaaatgaagcagagcctttcagactctttaaataggcaaaaaatgtgcctgtgtttatcatcgaattcagtggttctcaactggggtgattctgtccttccaggaaacatttggcaacatctggagacatttttggttgttacaactgggggtgatcctggcatggaggcaggatcctgagacactcctcagcaccttgcagtgcccagatggctccacccaagaggacaatctggctccaaatatccacagagctgaggcttagaaatcaaaactgacaagtatttgcagttttttattttattttttgagacagagtctcgctctgtcgcccaggctggagagcaatggtgcgatctctgctcaccacagcctccgcctcccgggttcaagtgattctcctgcctcagcctcccgagtagctaggattacaggcgcccgccaccatgcccggctcattttgtatttttagtagagatggtgtttccccatgttggtcaggctggtctcgaactcctgacctcaggtgatctgcctgcctcagccttccaaagtgctgggattacaggcttgagccacagcgccctgctgccttttcttagaaacagagattttagtttcaatggtgtttccagggcaacaaataaagaaaatcaagcagaattatagagatttcagagactgacagttactttaccagaacacaccatctgactgtgaagttcaggtgtatagaatatacaaatcttcttctataaaagaatatttgcaagtctagtttcatggtgcagaataattgtttttttcagctgtaggggaaggagaaacatgttttttcccctctgctggaaggaaaaatatgctgcctccctttctccctcccttcctccctccttccctctcctttccttccgtccctccctccctccctctctccctccctccctctctctcattccttccttccttccctccttccttccttcaacttttttttttttttttttgagatggaaccttgctctgtcgcccaggctggagggcagtggcgcgatctcggctcactgcaagctccgcctcccgggttcacgccattctcctgcctcagcctcccgagtagctgggactacaggcgcccgccaccacgcccagctaattttttgtacttttagtggagacggggtttcaccgtgttagccaggatggtctcgatctcctgacctcgtgatccgcccatctcggcctcccaaagtggtgggattacaggtgtgagccaccgtgcccggccttactttttaaaatttaaatttattggccgggcgcaatggctcatgcctgtaatctcagcactttgggaggccgagatggggtgatcacagggtcaggagttcaagaccagcctggccaacatagtgaaaccccgtttctactaaaaaatacaaaaaataagccaggcgtggtggtgggcatctgtaatcccagctactcaggaggctgaggcaggagaatcacttgaacccgggaggcagaggttgcagtgagccgagattatgccattgcactccaaccctggggaatagtgtgagactctgtctcaaaaaaaaaaaattaaattaattaattaatttattttttgagacagagtctcagtatgtcacccaggctggagtgcagtggtgcaatcttggttcactgcaacctctgcctcccggattcaagcaattttctgcctcagtctatggagtagctgggattacagacgccctccaccacccgactaatttttgtatttttagtagagatagggtttcaccatgttggccaggttggtctcgaactcctgactccaagtgatccacctccctcggcctcccaaattgctgggattacaggtgtgagccaccgtacctggctttaaaaataattttaaattaaattttatttattttttgagacaaggtctttctttgttgcccaggctggagtgcagtggtgcgatcacagctcacttcagtctcaacttccccaggctcaggtgatcctcccacctcagcctcccgagtagccggtaccacaggcaggtgccaccatgcctggctaattttttagttttattttttgtagagacaaggtctcgttatgttgcccaggctgctcttgaactcctgagctcaagcaattcacccgcctctgcctcccaaagtgctgggattacaggcaggtgccaccatgcctagctagtggccattatttattgagcatctagtttgtgccaagaactgctaaactaagcacatgtgggtcgggtgtggtcgctcatgcctgtaatcccagcactttgggaggccgaggcggacggatcacctgaggtcaggagttcgagaccagcctgaccaacatggagaaaccccatctctactaaaaatacaaaaaattagccgggtgtggtggtacatgcctgtaatcccagctactccggaggctgaggcaggagaatcacttgaacccgagaggcagaggttgcggtgagccgaggttgtgccattgcactccagcctgggcaacaagagcaaaattccatctcaaaaaaacaacaacaacaaaaacaaaaaaacaaacaaaaaaaccctaagcacttgtgctgttttaacgatacccagatagtagggggaaatatgagttatgacatagtggggatgcttttatcactttttacaggtgaggaaactgaggcacagcaaggttaagtcagccacttaaggtcacccaaccagtaactgacagagtggagatctggatcagaaggaagaatggaaaaaaaaatcttaaattattttaaaatcactatccttccatgcaggatctctttgaatcttcccagtgacttagtgaggaatgagctattttttttctgtattgtacagctggggaaactgaggcttagtgaggtgaagggacttgaccagagtgatacaggagcccctaaactgtggcaattcagttctcagggccaagttttggtaagagtgtcctgaagtggggtgagggcagcgtaaagaggaacatggagaagaaagcgtgggagggccgggcgcggtggctctcgcctgtaatcccagcactttgggaggccgaggcaggcggatcacttgaggaaaggagttcgagaccagcctgcccaacatgacaaaaccccatctctgccaaaaatacaaaaattagctagacgtggtgctgggcacctgtaatcccagctactcgggaggctgaggcaggagaatcacttgaacctgggaggcggagattgcaatgagtcaaggttgcaccaccacactccagcctgggcaacagaaaccctatctaaaaaaaaaaaaaaaaaaaaaaaaaaagcaaacagctgggcacagtggctcaagcctgtaatcccagtactttgggaggccaaggcaggagggtctcctgaggtcgggagttcgagaccagcctgaccaacactgagaaaccctgtctctactaaaaatacaaaatgagcccggtgtggtggcacatgcctgtaatcctagctactcgggaggctgaggcaggagaatcacttgaacctgggagacagaggttgcagtgagccaagattgcaccactgtgctccagcctgggcgacacagagaaactcttatcttaaaaaaaataataaataaacaaacaacaacaacaacaaagaaaagatgggagatgaagggaagcaggtgcaaagggctggatttgaaatcctgagatgataaaggtcaacacccaaaggctcaaaacccttctccaaaccctcatctgagctcacccagcacctgtgacgggggcccacctgcatagaaagacactcaattggatgttcatcactgcattgcgtataacactgtgaagcaggctacgtgtccatcagtaggagagcagataataaaatggggtctatgcataggctgataccagcccatatatccacccagaagatataggtgagtgggttagggcaagggctctgaaaccagaaggatctaccacttcctagctgaagaaccttgcactggtgacctcactccctcgtgcctccgttagctcatctgtagttaggggacaatcatagtatcaacatcgcaggggttaagatgatctgggttaagcactgagcatgtggaaatgactcagtagatgaggtgtcagcaaacttttcctgtggataagaccaatggagacctctaaaatcactttccttgtcacctctcactgaccaagacagtaaatcaatgcaaggttgggccaggcacggtggctcatgcctgtaatcccagcaccttgggaggccaaggcaggtggatcacctgaggccaggagctcgagaccagcctggccaacatggtgaaaccccgactctactaaaaatacaaaaattagccgggcgtggcggcacgtgcctgtggacccagctactagggaggctgaggcaggtgggtcacttgaacctggaagccggaggttgcagtgagccaagactgtgccactgcactccagcctgggctgcagagtgagactctgtctcaaaaaaagcaaaagcaaaagcacaaacacaaacaaaaacaaaaacaaatgcaaggttgcatcacagtggaatagcagagattaatgtcgcccttaagggcctaaagacatggtgagcaaggtctcagatccctcagggatgaggatctaggtgaccccaccaggtgagccacctacaccaacagaagggccacctgaagatgaagggactctagaagggacagtgggagagggagagggtgaacactcacgggggctgctagactccactcctgcagtgtaaactgtggctcatcccaccaaccttcattttctggctggcatagagaccaagaatcctaagtagctgtcctcaaatgcagtgagtctccttataaaacaaatgaatctgggccgggcgccatggctcactcctgtaatcccagcactttgggaggctcagttgggcgaatcacctgaggccaggagttggagaccagcttggccaacatagtgaaaccccatctctactaaaaatacaaaacttagctggacgtgatggggggcacctgtaaccccagctactcgggtggctgagacaggagaatcgcttgaacccaggaggcagaggttgcagtgagccgagatcgtgacactgcactccagccaaaaacaaacaaacaaacaaacaaacaaacacacacacacacacaaaccccaaatgaatctgagtggcttaaggggcgggctatagcggatgctgtggtgtgctacccaatccccaccgttctcctattgctattgtaacaaattaccacacacttaatggcttaaaacaacacagattggttgggtacagtggctcacatttgcagtcccagcactttgggaggccgaggtgggagtgtagtgagaagccaggagtttgagaccatcctgggcagcatagtgataccccatgtctacaaaaaaaaaaaaaaattagccaggcatggtggtgcatgcctgtagccccagcattttgagaagccaaggtgggaggatcgcttgagccaggagttcaagaccggccagggcaacatagcgtgactctgactctacaaaaaattaaaaagttagtcgggtgccatggcatgggcctgtattcccagcaacttgggaggctgaggcaggaggatcatttgagcccaagagtttgaggctgcagtgagctatgatcgcaccactgcactccagcctggctgacagctggtctcttaacaaaaacaacaacacaagtctattatcttaaagttctggagcccagactccaaaatcagtttcaccaggcttctccctgtgatttttcaatccagggttaaatgcactccaggctgctggagtgcagtcatatgatcgtagctcactgcagccttgaacccctgggctcaagcaatccttctgcctcagactctcaaagtgctgggattacaggcatgagccaccacgccctgccctccctgtgtctttataagatggtccctttttctgtatccctgtcctaatctccttttcttatacagaccctaatcttattgaattggagctcatcttaagggcctcattttaagttaattaccttttcgaagattcaatcttcaaatacagtcaaattctgaggtggtgggggcgaggacttcagtgtgtaaatttcgggggaacatagtgaggcccgtaccatggaggaaagttcctacaccctgctttttaggtagagatctagaaacatggaaagttccccagaggagttttagaggaacctaaagatagagaaggcttggactctgctcaccacaacagagaccagagaagcggcaggtctccaaaaaaggaagtgacttaatagtggctttgggcatctgaagccacagaaagcctcaaaaagtttcctgtgcctcaactcagctgaaaatcggcctcacgagcaaggtataggagtagtagagaaagtgctgcctttctttctttcttttttttttttgagacagagtcccactctgtcacccaggctggagtgcagtggtgcgatctctgctcactgcaagctccgcctcttgggttcaagcgattctcctgcctcagcctccccagtagctgggactacaggtgtgcacaaccacgcccagctaatttttgtatttttagtagaggcgggggtttcaccgtgttagccaggatggtcttgaactcttgatcttgtgatccacccacctcggcctctcaaagtgatgggattacaggcgtgagccaccacgctcagccaaggcgctgcctttctaaggaacaaggacaagaaagaaggtctcataggccaggagcagacggatggtggggaccttatggacatgcattttgagaattagtcttttcttcacccttaatgcctccgcaattccaaagctccctggaactttgacagtcttgggaaagcaggatgtagggagagatggtttccgagggactgttggcaggttctcagcattctggtacaaaggggtcttgaaatataaataacgttacgttaatgaaaaaataaagttaactttgcactccttgtggattgagatttaatttttttttttttttttttttgagacagggtctcgctttgtcacccaggctggagtgcagtggcatgatctcggctcactgcaacctccacttcccaggctcactggatcctcccgcctcagctcccttagtagccgggaccacgggcatgtggcaccacgcccagctaatttttgtagagatgggattttggcacgttggccaggctggtctcgaactcctgatctcaggtgatccacctgcctcgacctcccaaaggctgggattacaggcgtgagcctccatgccccgcctggattgagatttatataaactgcttttgtgccttagtttgagttcccataaaagcagaccctgggaaaaagatgtgggggcaagaggtttattagctagctattgctgtgtaagaaatgaaattatcaagaacctggcagcttaaaacaacacatctttatctttttttttttttttttttttttttttgagacagagtctcgctctgtcgcccaggctggagtgcagtggtgcaatcttggctcactgcaagcttcgcctcccgagttcacgccattctcctgcctcagcctcccgagtacctgggactacaggcacccgccaccgcacccggctaattttttgtatttttagtagagatggggtttcaccatgttagtcaggatggtctcgatctcctgaccttgtgatccgcccgcctcggcctcccaaaatgctgggattacaggcatgagccactgcgcctggcccacatctttatcattatctcagtgtcctcagtcagaagtccaggtacagattcacgtctgtaatcccagcactttgggaggctgaggcaggcgagtcacctgaggtcgggagtttgagaccagcctggccaacatggtgaaaccctgcctctactaaaaatacaaaaattagttgggcgtggtggcaggtgcctgtaatcccaggtactgggaggctgaggcgggagaatggcttgaacctgggaggtggaggttgcagtcagccaagatcgcgccattgcactccagcctggacgacaagagtgaaactccgtctaaaaaaaaaaaaaagttcaggtagacggacagtttaattgagcattgtgctgtgggtctcaagactacagttcatatgtcgactgcactacattctttcccggagtttgcagtccttttccaagctcagctggttgttggcagaattcggttccttgtggtggtaagattgaggccctcggcttttagaggcttcttgccgttctgtgccatatgaccctttccataggcagttcacagctggcaatgtgcttcttcaaggccatcagggaacctctcattccagtctgatagtcctatataatgtaacctaatcaagggagtgatagcccatcacctttgccatcttttaaatttttatttttatttttttaaattgagacagcatctcgttctgttgcccagactagagtgcagtggtgtgatcatagctcactgcagcctcaaacttctggactcaagcagtccttccacctcagcctcctgagtagctgggactacaggcatgtgctaccacgcctggctaatttttaaaattttttgtaggccgggtgcagtggctcacacctattatcctagcactttgggaggccgaggcagacggatcacctgaggttaggagtttgagaccagcctggccaacatggcaaaaccccatctctactaaaactataaaaattagctgggcgtggtggcacatgcctgtaatcccagctactcaggaggtccaagcaggagaattgtttaagcctgggaggtggaagtttcagtgagccgaaatcacgccactgcactccagcctgggcaacagagtgagagtctgtctcaaataaaataaaataaaataaaataaaataaaataaaataaaataaaataaaataaatttttttgtagagccaaggtcttgctatgttgcccaggccagtcttgaactcctgaactcaagcgatcctcctgcttcagcttcctgagtagctgggactacaggcgtgtgccaccacacctggctaagtttttaaattttttgcagagccagggtcttgccatgttgcccaggctggtcttgaactcctgaactcaagtgatccttctgcctcagcttcctgagtagctgggattacaggcatgcgccaccatgcctagctaacttaaaaaaaaatttttgtagagatgcgatctcactatgttgctcaggctggtttccaattcctgggctcaagcagtcctcccgcgttggcctcccaaagtgctaggattaccggtgcaagccaccacacacctggccatctttgtcatcttctattggttagaagcaagtcaggttctgctggaactcaaggagaggggattatacaaaggcttggatgccaggaggtaggaatttttgggaaatcaccccagggtctgtacaccacaaaggcatccccaggaaatgtgagaagaggtatgggtaggaactaatacagggtgtattagtgcacaggtgtctgctatgggctatcccattggggactttggggtgactgtgtagactatgccttggagttgtcccaccctggggacagggaagccgggtatttatccactaaatcccatccatcattggttaaatgctgctccttgtggtgttaatgatggaaactctctattgcctataactgacaccacaattctttacactggcatttacaatttccccttgccctgcctcattttcctctgtgacccctgccatggtcaccctccactgcagccttagactagcgatggccctgaatttcctccctgttcactgagatcttcctgatcctcatccagccttccatggcctcagaccactgagctctctcccgttgcagaaatcctgcagaacatttttcctggaccccttactgggtgtaggggaccccagaataactcatgtccaggctcctttttttgaggatcctctgggatgggtggaggagtcacagctggacaagatgcttttagttctatgtggtcagggctggaagaatggagccccagggatggagcccaggaatggaggagatgggatgtgggtgagattcagaaaaagctttatggaggaaggctgagcttatctttttgtctccttaccccaaaacctccctcccaactttgatgctggagcctgctgttccttctctgatcagaatcctctctcttcatgtctcacccctgtcctaacaggggtgctatgaatccactcttctggcccccaccattagatcactgatgtgatctaaccacatcagtctcctgctgaaagacctccaatgtttgagatatatatatatatatatatatgaaacttaatggttccatttctctggagaatcctgactaatacagattttggtaccaagagttgttctaaactgggtgtgatggctcatgctggaaatctcagcattctgggaggctgaggcaggaggatcgcttgaggccaggagttcaaaccagcctaggcaacacagtgagacctcatctccaaaaaaatttttttaattagccaggtgtggctgggtgcggtggctcatgtctgtaatcacagcactttgggaggccgaggtgggcggatgaagaggtcaagagatcgagaccatcctggccaacatcatgaaaccccatctctactaaaaatacaaaaattagctgggcatggtggcacgtgcctgtagtcccagctactcgggaggctgagaagggagaatcacttgaacctaggaggtggaggttgcagtgagccgagataatgccactgcactccaacctggcaacagagcaagactccatctcacaaaaaaaaaaaaaaaaaaaaaaaaaaaaaaaattagccaggtgtggaagcgtgtacctgtagttctagctgtttggaaggctgagatgggagaatcccttaagccaaagagtttgaggctgcagtgagcgatgattatgccattgcaatccagcctgggtcacagagtgagaccccaactcaaaaaaaaaaaaaaaaagtggttctagaggaagaatgagctttctgaattgcttctcgttcttctgaaattggctctctaatctgattaaactgaaagaggctaatgactctttacagtagtaagagagcactggtggtccatggcatgatctggcaatagagagatgcagatatcaccactgtatactcctaattaactatctataagaagcaaagatcttgtcactgtgtatttgatacttctgagaagttttgaaaatcgaatgaatataatgagattggctggctcctcctaatgtcactggatagagtgctgagagaagaggatgaacttagggatttgaattcccagctcaagcactgcataagtaacctgacatcttctatgtgtgccctaaaggacatccttgtctcctgtagcctcagggctgagagtggtgaaaagcaaacacagaatcttattctgtgattggccggatttcagggcaagttggactcccagcttccaaggatgtctactgataaactgagggcattgattagtatcaatggtatcctgtaagaatagtatcctggaaactggaattgggatatgtgggaagacaaggatgaagttgaggacatggagcacctaaattctgagtcttgtttgccgctggaaaggcctctaccttcccctccttggttctgtttctctggagaaccctgactaacatgactggcttgaatctggatccaaatgtaatcccagcactttgggaggctggcatggtggctcacatctgcaatcccagcactttgggaggtgaaggagagcgggtcacttgagcccaggagttcaagaccagcctgggcaacatagcgaaaccccgtctctacagaaaatacaaaaataagctgggtgtggtggcgcatgcctgtaatcccagctacttggaaggctgaggcaggagaatcacttgaggcaacatggttttatacatacgtgaaggagatacaccttctaccccttggagataccttcaaaatattcaagggggcatgtgaaatgggatgatatctgaaacaatatcaaatttagaaagagggtagttgataaagtcagcaaggcaggacattgaaactattgaatttaagtgatggatttatgggtatttcttagactattgtcctctccttttggaaggagaggaaagtttgcacactggatttgttggatgcatttcctactaaaaaaaaatcaataaatattttccctttacactctctacgcctactgctgttttttcttaagctattggatacactaggttgcttgtcctgtagatttttccagtgtgatttcacccttgcagtgtcattgcacgtattcttctatcccctaaccctgtaaaccagagcttggcaaatattttctataaagggcccaatactaaatacttttggctctgtgagttatgcagtccctgtcacggcaacttaatccttccatttaagtgcaaaagctgtcatagacagtatacaaatagacgggagtcactgtagaccaataaaaatctttatggatgctggaattttaattgcatatactttttgtgttataaaatattattcttcttttgacttaaaaatgtgaaactattcttaacttgtgagctgtacaaaaattggaggtggggcaggattgtgtccacgggccagtttgctgacccctgctgtaagctggtaatctgaacataagacttgatcagagtcgggttcaattctgggagacagagggagatttaaataccctgtaagggagattaaaacgccctgtgggtgaagctagactctggggaattggttttattaaggaaatgtcatttcgttgaacgtgatcatggcggcatggttttatacgtacatggaggagatataccttttatcccttggagatacattcaaaatattcaaggggggatgtgaaatgggatgatatctgaaataatatcaaatttagaaagagggtagttgataaagtcagcgtggcaggacattgaaactattgaaatgaagtgatgaatttatgggagtttcttagacaattttcctcttttttgtgcatgttcataaattgccctaataatttatttatttttttgagacagggtttcacccctgttgcccaggctggagggcagtggcacaaccttggctcactgcaacctccgcccctgccaggcttaagcgattctcctgcctcagcctcccgagtagctgggactgcatgtgcatgccaccacacccagcttatttttgtattttttgtagagacagggttttgcgatgttgcccaggctggtcttgaagtcctgggctcaagtgatccgccctccttggcctcccaaagtgctgggattacagatgtgagccaccgtgcccggccctaataagtttttgtaaaaatctctaggcattaacaatttttaaaaagtattctaatggtcttccattagaaatcttccattacacttaaaataaaattctaatggcttatacaaagtccttcctcttctgtctcctccacccctctggccactgctcactgcaccccgccctcctcctcactcttcacctctggactccagagactctgggtttcctttgattcctggatgtcttcaagctccttcctgcttcagagcctctgcacaagctgctccctttgcctagagccctcggccctccagtctttgttttatcaactcaaaggttaaatgtcagaatcctttgcattcccaaatcctggtcatgagccatgttatctaaggatattcaaggattccaaactcaaatgcttacaggggccaagtaattggtgtaaacatgtaaagtaagctggattctgtttttaacactcataggcacacaccttgattatttaaaatatagaaaacattctttatttgccacaaaggactgttatggcagacagaataaggcaatttctccccaaccccacacctcaagatgtccacatcctactccttaggatctatggatatgtttgtttccttacacagcaaaagagatttagtagatgtgattaagtaaaggaccttatcctgggttatgtgggtaggtccaacctagtcaaaaggatttttgttttttgtcctttttttttttttttggtaagtgacagggtatcactgttgcccaggctggggtgcagtggtgcgatcatggctcactgcagctttggactcctaggctcaagcaatcctcccatctcagcctcccaagtagctggaactataggcatgcaccaccacacctggctaatttttgattttttatacagacatggtctcactatgttgcccaggctgatcttaaactcccggacttaagcgatcctcctgcctcagcttcccaagtagctggaagtacaggcatgcactaccactcctggctattttttttttttgagacagtgtcttgctctgttgcccaggctggagtgtagtggtgtgatctcagctcactgcagcctccaccttctgggctcaactgatcctcccacctcagcctcctgggtaactgagactacaggtgcatgccactatgactggctaattaaaaaaaaaattttttttttgtagagatggggtctcaccatgttacccaggctggtctcaaacttctggcctcaagtgatcctcccaactcagtctcccaaagtgctggaattacaggcatgagccaccatgctcagtctaatttttttttaatgttaatttttgtaaagatgatgtctcagtattttgcccaggctagtcttgaactcctggcctcaagtgatcctcccatctcagtcccccaaaatgctggaattacagttgtgagccaccacacctggcctatttttgtttttttaattttaatgtttgtagagatgaagtatcactatgttgcccatgctggtcttgaactcctggcctcaagtgagcctcccctccttggcctcccaaaatgctgggattatagcagttcccagtcagagattcctataaaatggaggcaggaagggatcagagtccaagaaagaggtgataatgggagcagtggagggagagagagagatatttgaaggcgttatacttctggctttgaagacagaggaaggtggacatgaactagggatggatggtggcctccagaagtgagaaaaggcaggaaaaggctgggtgcaatggctcacgcctgtaatcacaacactttgggaggccaaggtgggtggatcacctgaggtcaggagtttgagaccagcctgatcaacatggtgaaaccccgtctctactaaaaacacaaaaattagctgggcatggtggtgggcacctgtagtcccagctactcgggaggctgaggcaggagaatcacttgaacccgggaggcggaggttgcagtgagccgagaccatgccattgcactccagcctgggtgacagagtgaaactccgtctcaaagaaaaaaaaaaaaaaaaaaagaaagaaaagaaaagaaaagtcaggaaaatgaattattccctagaactcccagaaaaaaatacagctctgctgatactttgattttagcctcttaagactcattttggacttctggcccctagacctgtaagaaaataaaatagtgttgttttaagccactaagtttgtgatcatgtgtttcagcagcagcagggaactaataaaacgatgaactctcctttttcttaaaactttggtcatctcaggctgttatatattttctcacctttgatggagaagtgacaacttctctgtgcctggatttccccatccataaaataggagtcaaaatagtacctccctgcaaggttattgtgagaattaaataagttaaagtgaatgagtaacacttatcatggtgcatagtgagtactccagaaatgtgaagtataattaatattactattacttaaaaacaacagcacaagtatgatgatgaaaggcgactggcattcagcctcagtgtgagagacaactgggagtggtggggactgtggtgagctgctgagcccatgccctatccaaaggagacagccactatccaacctgggctgttgtcacagcttctacctccccaagaaaacccagaaatctggatttgtccatgtctatgtgaaaattttcttttttcttttttttttttttgagatggagtcttgctctgtctccctgtctggagtgcagtggtgcaatcttggctcactgcaacttccacctcctggattcaagcaatcttcctgtctcagcctcccgagtagctgggactacaggcacatatccatatgcctggcttgtgggtgaaacacccatagggtttcaccatattggttaggctggtctcgaattcctgacctcaggggatccacccacttcagcctgccaaagtgctgggattacaggcgtgagccacccacgtgcaaaatttttgaatatttatataatggttaccaattcccatttaaaaaacacactagatgtggcctgtgaatgtaaggccacttttgatgtaataactgaaaagaatcagaaatttaaatgtgcacatgattacagcatgcttacaaaaagaatagctacgaaggattcaagagctcactgtgggccaagctctgtaaaagtacctaagggttcaagccatgtaatctcacaataagcagggtaaggtagaggccacttttcatcgtcttttaaagatgaggaaactgaggcccagagatgccaaggatgaatactaaggtcacccatctgggaagtgacagagtggggatttgacctcagggggtctggcttgtaaaggaacatagaaaatatcagaaccctcaacctctttgtgcaaaagggaaggctaagcttggaggctgagtcattgtcacatcctcatccaatgaatagctgtcactggttttatgtatcagctatatccccccacccccaaaagtaaaaggcctcaggcatctatgaagggctaatccccacagatctttcctcaggaaattctttgctggcttcctataaacaagaacatgaaaatgttaactttaggtctgcaatctaaagctaaagtctgttccatttcacagtgacaacgtcaattacaagcttatcttcccaggtgaaagacaaagacaagacaagattagtcattgctcccttcctcttcaaacattcaccttagcttatgtaaaatgtagatttactgggcactaactaaagtctcataagaatgtaagggtttgccttactgcctacctgcctttcttcctcagtgccattcccctctttaaggaaatgtgtaggccgggcacggtggctgatgcctgtaatcccagcactttgggaggccgaggcaggtggatcacctgaggtcagtcaggagttcgagaccagcctggccaacatggcaaaacctcgtctctactaaaaatacaagaattagccgggcatggtggcgggctcctataatcccagctacttgggaggctgaggcaggagaattgcttgaacccagggggtggaggttgcagtgagccgagatcatgccacttcactccaacctgggtgaaagagcaaagctccgtctcaacaaaaaaaaaaaaaaaaaaaaaaaggccgggcgcagtggctcaagcctgtaatcccagcactttgggaggccgaggcgggtggatcaggagatcaggagatcgagaccatcctggttaacacggtgaaaccccgtctctactaaaaatacaaaaaaaattagccgggtgtggtggcgggcgcctgtagtcccagctactcggaaggctgaggcaggagaatggcgtgaacctgggaggcagagcttgcagtgagccgagatcccgccagtgcactccagcctgggcaacagagcgagactccgtctcaaaaaaaaaaagaaaagaaaagaaaagaaaagaaaaatgtgtaaatatgaaacctcctgaaacttctttggaaaaacagccacagaggcaactgtggctggtgattttcccagatgtgtgctaaagctggcttcagaaaccttgatcaattgactcttgcccctgtctcacattctggtcatcaggctccaggataagaaccatcctgcttctctgcaacgatgcgtctcaagtgttcaaatgctgtggcattccccaggaggaacatagcgtcctactatgagattaatcatttgttttcttggccaggcatggtggcctgtaatcccaacactttgggagaccgaggcaggtggatcacctgaggtcaggagttcaagaccagcctggtcaacatgttgaaaccccatctctactaaaactacaaaaaaaaaaaaaaaaaaaaaaattaaccagatatggtagcgtgtgcctgtaatcccagctactcaggaggctgaggcaggggaattgcttgaatctgggaggcggaggttgcagtgaggcaggatcgcgccactgcactccagtctggacgacagagtgagactgagtctcaaaataataataataataatttgttttctcatcattgcttctttacttctaccacctcttggtcttggcaagagatgaagaggggggaggatttcctgcccagggggtgggggtagggtgaggacggtggacttcaggtcctgaggaagagctgatggtggtggtgggttggtgggtgcggtaaggaggcaatctgaaaagaagctggagcgcaggaggcgaaaagaggaaatgaggtagataaacttctcagaagtgaaaagtaggttagcagcctggtataggaggtctctgtccctatactttattgaaggtcaagtacgggtgtacagtctcttgttgcaccagcttctgtctttgtggggtttttccttgttctcctcccatcttttcctcccctccctgtctttcctttctctcctctctttccccttcatctccttcccctctccactcctcctctggctctccccttttttccctctccatcctcctcctcctcctcctgccacctcctcctcctttccccctctttcttcatctgcccttccccatctctttccatcctcctcctcacccacgtctccttcttcctctctctccagctcctccaggttgagagacgcctcccagaatgatttttggaggctaaacttagcaagaggttccatccccacgcggaagttggtagctgctggtgacttttatcaatacatgctctccacaccttggtttcctcatcaaagccacagaaacagaaagactgtgatgagagtgaaggaaactccagcgggggttggggccaggcgctgggggctctcctacctcccaccagcccagcaagggcagggaaggcaggaaactgccctgaatccactgcgtacccttggcagaggtaaagggcatccttgcctctctcggtccacagttctgcgtctaagatgtgcagacagtaacagctcctgcccgaagccaaaagatgcatataaatgtataactcacacaagacgcctaggccttgaataggccgggcacggtggctcaagcctgtaatcccagcagtctgggaggctgaggggggtggatcacctgaggttgagagttcgagaccagcctggccaacatggtgaaaccccgtctctactaaaaatacaaaaagaaaaaaaaaattagctggttgtggtgggcgcctgtaatcccagctactgggaggctgaggcaggaaaatcacttgaacccgggaggcagaggttgcaggttgcagtgagctgagatcacaacattgcactccagcctgggagacagagggagactcagcctcaaaaaaaaaaaaaaaaagaaagaaagaaattcatttatgtttcatatataccttgtacacatagactgaagataatttcataaaatagtattaataattttgtgcatgacacaaagttggtgtacactgaaccatttgaaagcaaaggtcactgtctcagccacccatgtggacaatctgtggttgcttggcatcatcatcattccttttatttatttattatttttatttttatctttttttgagacagagttatgctctgttgcccaggctagagtgcaatggcgtgatctcagctcaccgcaacctccacctcctggattcaagcgattctcttgccttagcctcccaagtagctgggattacaggcacgtgccaccatgcccagctaattttgtattttagtagaaatgaggtttcaccatgttgaccaggctggtctcgagctcctgacctcaggtgatccacctgcctcggctggaattccaaagtgctgcgttgtaaccgggcaagttatagagaaacgccacactcttagactaattaaggagtcctttattagccggcgactgagagatggctagcgctcaaaattctctcagccccgaagaaggggctaggtttctttttataccttggtttagaaggggaggagggagcagagctgaagcaattttatggaagcaaaacaggcaagaaaattaaaaagataaatggtaaaaggaaaacaaacagttccaggtgcaggggctttaaatctatcacaaggtgatagacgcgggggctttgggtgctatcaaccggacgaattcctgggaattgtggatatagcttgtcacagtatcttatcagtaatcgcattcttggatgtgctgggagtcagcttaagtccttgaggaaggggggtgggtgagggactgcaaatgaaggagccaaaatggagtctgtctggctttctcagctaagggagggtcaatcaggttaaaaacaaggtagggtatgacattccccactcgtgttttggggaatcgaatcattgattcctcggttataacaagggggttatattgggtcctaagatacataagtttgacagaagctatgcgctgctttataaagttaagaacccatttaatacacaaggcctgaagactaacaagaggaggagaatgggtcctgccaatccagtaatgagagtcgtcagccatggattccaattaagcatgttttggtaccagggggtgttattttctcgtttttgctggcatctatctagattttctcgaactttttggagagtatcttttatgactccagactgattggcatagaaacaacgactctctcctagagctgtgtgtagccctccttgggagagaaatagcagatctaagcctcggcggttttgaagaactacttcagctagagactctacctgggtatgcagtatatttatggctgattggagattgcttaaattagcatctacttgttttttttttttttgagacagagtctcgctctgtcacccaggctggagtgcagtggtgcaatctcagctcactgcaagccccgcctcccgggttcacgccattctcctgcctcagcctcccaagtagctgggactacaggcgcccgccaccacgcccggctcgttttttgtatttttagtagaaacggggtttcaccgtgttagccaggatggtcttgatctcctgacctcgtgatccacctgccttggcctcccaaggtgctgggattacgggcatgagccaccgcgcccggccagcatctacttgttgagacagggacattagtccggtctctccttgaaccagggcagccgtgccaatggctgctgatccagctatgctaaggccggccagaaggggcacaaggagtggggcagctcggtgaaacctggaatgtaattcagggggagcgatgagaagctgtccttctggcccactgtacgtgtagacctgggggagcacatgaaccaacacgcacaggaggggtcctggttcagtcccattgatgcagcgagtgagacctaaagtgcaggctaaccaggtattgttaggtgcctggcaggagactgaggcacttaagggagtaagtagagactgattacaggtagcctgtaagggagaagtagagaagttatatccagtgctaattagagaagaagtattcccggacatgtctcctagtatgagggcatgggggcgtgtatgacaagaaagagagcccattttattttgttttgtttagttttgtttgaggcagagtctcgctctgtcgcccaggctggagtgcagtggcacaatcgcggctcactgcaagctctgcctcccgggttcacgccattctcctgcctcagcctcctgagtagctgggactacaggcgcccaccaccacgcccggctaattttttgtatttttagtagagatggggtttcactgtgttagccaggatggtctcgatctcctgaccttgtgatccacccacctcggcctcccaaagtgctgggattacaggcgtgagccactgtgcccggcgaaagaaagcccattttaagcatagcttctactcctaatccaacatcatatgggggtttggccttcaggcacaaccaacaatctcgggctagttgaggccgggtgagattaaggaggtgctgtaccctgtccagaatggacatcaggctgggttggaggtgttgccgttgcagctgaggtttagaaaccaggaacggcggtgggaaagttaaatcgaccctgtctgggtgttttgggaacataggattacctaaatcagttaaaggtccgattggcttaggagagctctatgggaccaggatttttttctggatggtgaacatagttccaacattaaatcctgagatataaagccttaatccccatgacatgccataataccattgagctgtaccagggttatggatagttgtaggaagagggttgcaatttctcatagtacacagtctaggatgggaagtgcgagttatggagagggttgaggactgggttgatcctccagggtaagtggctagggttacacaggaccagcgagggcagaaaaactgataagaatcttgacaacttcagtcagggtgatttccaagacagaggtaaaagtcagcctcctggagtcctttttctgcacctttagagcttccacatgcagtccggcttcctatgtgtccaaaccctgctgcaaggtcgacgttccctgttcccatgaccggcagattgcgttgctcttcacgggtgagggcaggctctgggaacaaagcacataaatcgactgcaaaagagacttccttggaggtccccgccttccaggtggtgattgcaaacacacgtcctgtcgtgaaagaagtaaggagaaaagagtaggaaggagcagagggcatgacaggtggaaacaaacaaaagaggtaaataaaaagaattaatccaatggcttcactcgacttaggtgcagttttaaggggcccgacccaggcttggggtctgtgctggggtcttgcttggggtcttgctggactttgttggcctttttgatgtgagagtgatgaacccaagcaggaatgctgtccactttcagatctgtcggcatggtgaggatgacagtatgaggtcctttccaggcaggagtgagtccttccttctggaactttttttttttttttgagacggagtctcgctctgtcacccaggctggagtgcagtggagcgatctcggctcactgcaacctccgcctcctgggttcacaccattctcctgcctcagcctcccgagtagctgggactacaggcacctgccaccacgcccggctaattgttttgtatttttagtagagacggggtttccctgtgttagccaggatggtctcgatctcctgacctcgtgattcacccacctcggcctcccaaagtgctgggatgacaggcgtgagtcaccgcgcccggccgagaaattttgtaacatgcgttggagagggctccaatctctacagggctgggaagaagagtttcccattctggaggcaattaacaaggtttaagcagaaatataaaacccagcacggacagagaaattcacggcctagagggctgcagtatcggaagaacagaggtagatgtgcggggtaagggatggggatgaggaggaaaaggggccactcggatcttctcaggctgggaggagccgtgctgggcagcgctgggtcgccaggactactccgcagtccccccgccccgcctccaggccccgtcaggcgctgcaagcccagctcagaagcccgggcccgggaccaaggtcaccgcagcagtccgggcccctgcgttctgagccgggtgcggacgcgccggtagtcggggaagtcagggtctttgacgcctgaaggcgcaggagcgggggtccctgggggagagggtccagcaccgtcacctcccactcctcatccgtgggttggggagcccctgctgtgggggaaggaggctgtttcgtttgtaaactggcggaggagtggcccctgggcctggcaacccgaagagacacgcctgagaccccctgtaatagaaaatctgcactaaaggactttgaagaagtccttgcccagtcgtcttgggcaatatgggtgacctgacccatgaaatttagacagacaccaaacaggacaatagacactaaacaggacaatagacactagggtatatagacaattatgacaatttttatagacagacaaggggtgggggtcccgtgatgggatcagtcagatgcccgcctggccactccccttgtgaggactcaggctcctcttagctttggcaggccggtataaacgcccgttcagatccagctatgctcaatgctgccctaagccttatgaggtcaccacggaaccacaggtgagggcccactcgaactctgtagcttttgccgtggagctacaaactgaaaattcaagcgcgagcccttgacctccacattcactcactcactcacacagagtttattacaattcttcaatacccgttttaaaacagaggtctccttgagacctcaacgagaggagaagagatagagagagagagaaagaaagagactagtcttacagagatgcctgacagaaaccaggactctgtcctccagcatcctggaatttggacagagtcagagggatgccctcatcagagccgcttccctcccagagaaacagagtcagacagaaaccaggactctgtcctccagcgtcctggaatatggacagagtcagagggacgccctcatcagggccacctccctcccagagaaacagagtcaaatctgacttaccttcccgggaccagacactgaggactcaggagttgaatttggttgaggacaccggcagccgatccgttcccctctggaagacggtggcctacacgtccctggaacgtctttaggtggcgcctcccctataagctcgccgtctgtccaggggagcccggaacgggtccagatttcacccggtggcggatctcgctgtggcctccaaatgttgtaactgagtgagttatagagaaatgccacactcttagactaattcaggagtcctttattagccggcgactgagagacggctagcgctcaaaattctctccaccccaaagaaggggctaggtttctttttataccttggtttagaaggggaagagggagccgagctgaagcaattttacagaagcaaaacaggcaagaaagtgaaaaagataaatggtaacagaaaaacaaacagttccaggtgcaggggctttaaatctatcacaaggtgatagacgcgggggctttgggtgctatcaaccggacgaattcctgggaattgtggatatagcttgtcacagtatcttatcagtaatcgcattcttggatgtgctgggagtcagcttaagtccttgaggaaggggggtgggtgagagactgcaagcgaagaagccaaaatagagtctgcctggccctctcagctaagggagagtcaatcacgttaaacacaaggtagggtatcacattggaattacaggcatgagccactgcacccagccgacatcaccatccttcctgactctgaatttatatactactaaccagcaatcattttcctccacctattcaacacagaagtacctaacagtaaaagatgagagatacctatctggcatgtgagaaaatgatatatagctactgacggggatttcctttgaggatgctgagtaaacttcgtggtgtgtgcctgcatttccactgcaatctatcacatgtgatgagttgtggaatttcccacttgtggcatcacactggggctcaaagagtttcagattttggagcatgtttttttgttttttgagatgggagccttgctctgtcacccaggctggagtgcagtggtgtgatctcagctcactgcaacctcaacctccagggttcctgcctcagcctcccgagtagctggggttacaggtgccccccaccacacccaggtaattttttgtatttttagtagagatggggtttcgccatgttggccaggctggtctggagctcctgacctcaggttatccgtccactttgacctcccaaagtgctgggattacaggtatgagccaccacgcccggcctagattttggagcattttgaatttgggatggtgaatctgtactgttgttcctctccccccacaaccatcttgccgatggggaaactgaagcattgagaggtgatggaaattgctggaggtcatatagctggtgagtggcagagtggactcagaacccaggatcatctgattgcaaaatctgtttccttcatctctgtactgtgcaacaatgacaagaatactattggcgataacaacaataacccacaaattttgacttgtcattcacaacaacaacaaaacaataataacaatacattcacctctggggtcgaaacccatatcctagaatcctaggaactaaggattccctccagccacactgcagcaatgctcatttgcatagaccctctaatttgtatgcatatcattatctgcccccacccaacccaccagctccctgtgttttatgcttccagctggcttggcggattgtcattctgtcctggatgtgtctaataagggcgtcttgcgggatgtagcctctacttcctcaggaattgtggattggagaggaagccagatccagacgtgaggtctctggtttcccccacatttcctgcatggacttgagccaactgggtccaggttcctcatctgtagaatgacctccatgggtcattacctccatccctctgcctctaggagccaccacttgttgctgatggttgccccccatccgactcctccctttccctgtggggctctttaggcctgacaattcctctccacccttcttcagtttgttcccctaagaactagacagatccaggtacaactatttgccatttatttcaaagatcagtggttaagaggcccagggttatgaacaaggtctggtcctcaccccgagatgtgttagtctgggctggggagggccctcaggctgtgtgtatatgtgtgtaatgttgtgtgtttgtcattgtgatgtgtgtgtgatgtgtgtgtcattgtgatgttgtgtgtgtgtaatgttgtgtttgtcattgtgatgtgtgtgtaatgtgtgtttgtcatcgtgatgttgtgtgtgtaatgtgtgtttgtcatcgtgatgttgtgtgtgtaatgtgtgtttgtcattgtgatgttgtgtgtgtgtaatgtgtatttgtcatggtgatattgtgtgtgtgtatgtgtgtaaccaggtctgactataacttggtctgtctgtgtctaatgtaatgagtattaattaccaagtgtgacggtgacacctctgggagtggctgtgtagctgggatgctgtctgagttttgtgtgcttgtgttataacatacacacagtgctgtgactgtctgtgatgccgtctgtgacttccatgtgattgtgtggttgtgcatgaatctggcacttcgcgtgtatgagtctatagttgtgaaagagtggctgagattatgcagccatgtgacagattttgtgggatgccataggtgtgactgtagagtcattcttccttcctttcaatcagcaagcatttccctagagcatgctttgtgccaggccctgggccggatgccggggacagatccgtggtgtcctattagggatgtctatgcttggcagtgatgaaatcagccatggtggtagcatttacaccatggaaattggcaaacattacaaagctgtccccctcccaggacagctggttgttaaacagttatgagcacgctgccgtgctcatgtatctgagtgtaactctttgtgaccaggctgaggtgtggccaccagtctgtgggtgggatctgagtatgtggggtggggctgggctcttcatgatgagtcccgatgatcagtctcccgcccaccctgtccgtactcatgatgagagtagggaagtggatgaagtttcccacccccagccaagtccctggaatcccaagccccactttcttctgaatcaaaagcataaatacccacccctcaccccttcttcctgaatatcaggcaaatcaactttaccccatgtttgggggcccacagaccccaagtctctgggtttttgtccttagtattgtccgtggcagggtctgcagtctacgtgggtcttctgaaggtgcctgctggggcttcatctcgccttggtggtgcccactgagctctccgcctttgagttttgggttccctggagtgtcccccaagatctgtttcctgagttttcttttttcttcctttcttttttttgaggcacagtctcactgcgtttcccaggttggagtgcagtggtgtgatctcggctcactgcaacctccgcctcccgggtttaagcaaaattatcctgcctcagcctcctgagtagctggattacaggcaggcaccaccacgtccggctaatttttgtatttttagtagagatggggttttgccatgttagccaggctggtctcgaactcctgacctcaggtgatccgcctgccttggcctcccaaagtgctgggattacaggcgagagccaccacgcccagcctctgcttcgtgagttttctttcccctgaggcaccctctgagttctccacgtgtcagacccatgtccaatgcaccacgctccttccttcacaccatgaaagccccgaagtaagaccgggtaccatcacgcagtcgaaccaggcgttcatccagcacacggacgaccaccttctccccagcctccaggtgtaccacaccacccaggaagctgctgtcccaccagacccgggagctgctggtggcccgtccgcagggtgactgctggctgaccaacagctccagctcctcggggtagcggggtgtgcgcttgtagaggccgtgggtgatggtgctggccaggcccagcgggcagcccacaccgcccagctgcaccttggagtagatgtagtagtagccagctttggtgaccacaagggccccatcgtggtagctgaggcccctcaggaaggccaggcccagctgagtctcccataacagcggccccccgctgccggtcaagctggagttggcccctgttgggaagagagagacaaagggggctgccggtcagcacatgtcttcctctgttgcttgtttgtttgtttgtttgacacagagtctcgctctgtggaccaggctggagtgtggtggcatgatctcggcttactgcaccctccgcctcccaggttcaagcgattgtcctgcttcagtctcctgagtagctgggactacaggtgcccgccaccgcacccagttactttttgtagttttagtagagatggggttttgccatgttgctgaggctggtcttgaactcctgacttcaggtgatccacccgcctcggcctcccagagtgctgggattacaggtgtgagccaccacgcccggcctcacatgtcttactcctgctgtgtgactccaggccagtcaccactaggctgtttgtgtgtgtgtgtgcatgtgtgcgtgtgtgtgtgtgtgtgtgtgtgtgtgtgtgtgtgtttgtagaggtgggggtctcacaatgtggcccaggctggtctcgaattcctgtgctcaaccgatccttcaggctcccaagtgctgggattccagtcatgagccaccaccctgcctagcctgtttgtatgtattaatttgctttatccctgctttgcagaggagggaaactgaggcacagggaagcaaattaacttgcttagtctatatctcaactctttgcatccctcttttgcaggtggggaaactgaggcatggaaccgttaagtgatttgccaaaagtgtcaaaacttggctgggtgtggcgtctcacccctataatcccagcactttgggaggctgagacaggaagatcccctgagcccaggagtttgagtccaggagttccagatgaagtaacatagggagaccctgtctctacaaaaaacaaaaaaattagctgggcatggtggcaggcacctgtagtcccagctgctggggaagctgaagtgggaggatcgcttgcacctggcaagttgagggtgccgtgagccgtgatagcaccactccagcctagttgacagagtaagaccctgtctcaaaaaaaaaaaaaaaaaatgtccaaacatgcaagtttgcaaaaccaagaaaccaaagcggcacctcgtactcgctgtgtgcctcagtttccctctctgtaaaatgcgcatattaatagcacctgcttggaatgtaatgaattaatatgtagaaagcgtgtcacagcacataacacagcataagcactatatgagagttcattaaattaataaaactaggccgggcccggtggctcacgcctgtaatcccagcactttgggaggccaaggcgggaggatcacctgagatcgggagtttgagaccagcctggccaacatggcaaaaccctgtctctactaaaaatacaacaaaattaaccgggtgtggtggtgcatgcctgtaatcccaggtacttgggaggctgaggcagaagaatcgcttgaacccgggaggcgaagactgcagtgagccgagatcatgccactgcaccccagcctgggcaacagagtgagactgtctcaaaaataaataaataaataaataaataaataaatagaaataaaaaataataaaataaataaaactggaaatacatagcacttgcagcctatgttctgagcaactctgtgagtaaataagcaatgaatgaatgaatacactgatatgtatggcgtttatctggtcttcccgagacgccctgacccctgccccttgccaggatccagggtccctctcacctgtgagatgcgctgctgggttgacctcgtgagaccttcgctctggggaaagagggtcagaggttagagacgaagacagtggaggtaaaaagccagcctcctaaagggccaccgtgtacacctcctggaatcaaccccaccccttccggagtgacccaaacttctgcttctcaggcctgggggaggggcacctgtgaggatttggccagttgtgcaaatcatattgggcaattgaccgaggggtgggggtggcatgggaatcatcacacctccttccctggggccaggaccctgactcaccttgtatcagctgctcccaggagcctgcaggtccgtcctgaaaatgcagaaggggcctgcggtaagaacctgcagcgggggccacgccctcgcattgctcacacatggctatgagacatgaggaccatagccaccgacaccaccctcagacacgtacacagggccacatactctcacttgcagacacacaccccctgtccagaggcctcacaaccacttggtgcctcagtttccctctatgtaaatggagttacgaatcgtgtctgcttggcgtttaatgaattcacatatgtaaggcattattacagtgcttggcacatagtatgcactagagaaaggtttaataggtcgggtgcattggctcacacctctaatcccagcacttcgggaggccgaggtgggcagattacctgaggtcaggagttcgagaccagcctggccaacacagtaaaaccctgtatctactaaaactacaaaaattagctgggcctggtggtgggtgcctgtaatcccagctgctctggaggctgaggcaggaggatcgcttgaacctgggaggttgcagtgggcccagattgtgccactgcactctagcctaggtgacagagtgagattctatctcaaaaaataaataaataaataaaagggtttaataaataaataacattgcccagagcagtggcttacacctgtaatcccagcactttgggaggccaaagtgggaggacagcttgaggccaggagtttaagaccagcctgggcaacacaacaagacctcatctctacaaaaaatttttaagattagccaggcatggtggtgcatgcctgtagtcccagctactcatgaagctgggacaggaggcttgcttgagcccaggagttcaaggctgcagtgagctatgatcgtgccactccactctagcctgggaagcagagtgagacacagtctctaagataaataaatatgtaattaattaaataaataagtaatatttaaaaatacagggacaaggccaggcgtggtggctcacacctgtaatcccagcactttgggaggctgaggcaggtggatcacttgaggtcaggagttcgagacaagtctggccaacatggtgaaaccccgtctgtactaaaaatacacaaattagccaggcacggtggcggatgcctgtgatcccagctactgctcaggaggctgagacaagggaatcacttgaacctgggaggtggggttgtagtgagccaagactgcaccactacactacagcctgggctatgggagagaaaccttgtctcaaaaaaaaaaaaatgcagacagcgagatggctggacacatggacaccacccttgggatatagcacctgccacagggcacagacctcaacatcatcatgacgctgagaagacacatgtgggctcagatgcgtggacatgtggtttgtggtttatggatccatgtgcgtctacagacacagagacccagagacaaagacagacaacgtgaatacaccggctgcagctaggcgggtgtgtggacatgtgggtacacgcacatacgtccacatgggtatatggacacgaatgtgtggccaccggatccagacccaggacacaaaaggggccaagcccacaggggtatggtgttgggcacacatagacccccaggtgaggcacacagacaggcggacacatccacagccagctggaagcagaccgagaaatttccacagatggaaatggtcagagaattaatgacaatcgcagtaacagtaataagagtaccagagaaggccaggcgcagtggctcacacctgtaatcccagcactttgggaggctgaggcgggtggatctcctgaggtcgggagtttgagaccagcctgacaaacatagagaagccccatctctactaaaaatacaaaattggccaggcgtggtggcgcatgcctgtaatcccagctactcgggaggctgaggcaggagaatcacttgaacccgggaggcagaggttgcggtgagcagagatcatgccattgcactccagcctgggcaacgagagtgaaactccgtctcaaaaataaaaaagtacagagaaaatgcatgcgtgtgtgcacaggggtgtgcatggcagtgttggggtgtcagttccgacgggtggagctggcatcgtctggtactacacatgccatagcatacttcgtcccctatgaagagactgcccttattttgtagatgaagacactgaggttcagagaggtgaattcacttgcccaaggctgggagcagcaaccagtcaagccagctgctctcagcctgtgccctgtcctacacacacacacacacacacacacacacacacacacagacacacagtgacccacaatgacacaggggagcccccctcacctccacctgctctcagccccccggtcccactcacaggcaggcgggtgaccatctctcctagacgccagtgcagctgcaggaggaaccagccttggacggccagcccggcccccatcagcaacagcaagagacccagacccacccgggccacactgcacgactgtctccggtggcttcgtcccagcctcgtgaatgggatgtcggtctgtccatccaccacaaacactgagggccgtacgacactctcctccatgcccaaggtgtctggagcagggctgacacgcctgggtccttcaacctcagaggaaaccgaaattgctcaacactcctgggctgtgcacgctgcggacaggcacccgtgggccgcctttagagctggggttcagccccaccccttcccccactcaccctcctcttcttccggtacccgccgcccccggtcttggccctgtctcactctcactcatacagactctcacactttccagaggcttctgaaaatgtgactcaggtggcaagtgcagtggggagcccccagctttcccttcttggatgcttcattcgcttggggccaccaaatatcgactgaggactttctgcccatgccaggctctgctctcggtgtgggggatgcagcaatgaacaacagcaagaagggtccctgctcctcttctggtggagccagagagacaagaaacctcgtaaacaagaaaataatacgttgtgggtttttttgttcgtttatttgttttgtttttgagatggagtctcgctctgttgcccaggctggagtgcagtggcgcgatctcagcttactacaacctccacctcctgggttcaagcaattctcctgcctcagcctcccaagtagcggggattacaggcgcgtgccaccacgcctggctgctttttgtatttttagtagagatgggttttcaccatgtcggtcaggctggtctcgaactcctgacctcaagcgatccacccacctcagcctcccaaagtgctgggattacaaacgtgagccgcaccatgcccggccttctgttgtgttttgatgtgacaagtgcagtgaaaaacacaagagtggaataaaggagtggatgtgtgctctgtgtgtgtgcttgtctgcatgcatatatgtgtgcagtgtgtgcatgtgaatgtgtgtattcagttgtgtgcatgcaagtgtgtatcatgtacacatgtgcaggcgcatgcctgtgtatcatacatgtgctggcatgtaaatgtgcgtgcatatgtgggcaggtgcatgcatatgtgtatggtcatctgtgtgcatgtgcatgtggtccatgtacatgcatgcatgtgcacgtgtgtgtatgtgtgaacatgcatcacatgtgcaagtgggtgtgcatatatgtgctgtgtgcaggtgtgtgcatgtgtgtgtgcctgtgcattggtgcgtgtatgtgtgtgtgcgcacttgcacgggtgtgttcatgtgtgtggggaggtccatgtatgagtgtgcatgcattcaagcgtggatttttttttttttcgagacggagtctcgctctgtcgcccaggctggagtgcagtggtgcgatctcggctcactgcaagctccgcctcccaggttcacgccattctcctgcctcagcctcctgagtagctgggactacaggcgcccaccaccgcacccagctaattttttgtatttttagtagagacggggtttcaccgtgttagccaggatggtctcaatctcctgacctcgtgatccgcctgccttggcctcccaaagtgctgggattacaggcataagccaccgcacccagcctttttctttctttttttttttgaggcagagtctcactttgtcacccaggctggagtgcagtggtgccattttggctcactgcaacctctgcctcccggattcaagcaattttcctgcctcagcctcctgagtagctgggattacaggcgcccaccaccatgcatagctaatttttgtattatatgttggccattatatatgttgtaacatatatgttgtctatatgttggccaggctggtctcgaactcctgacctcaggtgatctgcccacctcagcctcccaaaatgctagaattacaggcgtgagccactgcacttggcttctgtcttgtttcataagtatctttgtaatatccttgattttacctcttggccctgaaagccaaaaacacttatgtggccctttatagatacagtttgctgccagcttgcccctgagcttaggctaagacacgaagtgcccttcactggggcctctgtggttggaccctcgtgcttttgctcactctgccccagacagatatcctgggtctttgcacttcctcttcctgctgctgggaaccatcttccctagatctccaaagcaggctccccctgctcatctgcgtcttgactcaagaaacttctcacaggagccctccctgaattggtcaggtgtctcccgagagacagaaccaatagaagatacacagagagatagagatgggatctataggctgggtgcggtggctcacgcctgtaatcccagcactttgggaggctgaggcatgtggatcacctgaggtcgcgagttcgaggccagcctggccaatatggggaaaccctgtctctatcaaaaatacaaaaataaaaaataaaaaattagctaggtgtggtggcacacttctgtaatcccagctacttgggaggctgaggctcaagaatcacttgaacccgggaggcacaagttgcaatgaactgagattgtgccactgcactccaggctgggcaatggcatgagactgtctcaaaaaaaaaaaaaaaaaaagagatctgtagagacagacaaagatacagagtcagagaagagacagacatggaaaactagagagacagggacacagagatacaaagacagacggagagagagagagagagagatgtatagagtcagagagagtgtgtaacacatttattttaagaaattagctcacacaatcatgggagttggcaagtctgaagtccacaggacaagccagttaggctggaggctcaggtaagaggtgacactaccgtcttaaagcctaaagcctggaaactcaggcagaattactaagttgcaaccttgaggcagaattccttcttcaggaaacttcggtgtttactcctcagaccttcaactgatcaggtgcggcccactcacattacctaggctcatctcctgtcctgaaagtcaactgtggttgttgacatgatctgaaaattacctttctagccaggtgcagtggctcacacctgtaatcccagcacttaggggggcagaggcgggaggattgcttgagcccatgagtttgagacctgcctgggcaatatagtgagaccccgttctcaacaaagaggaaaaaaagaaaaaagacaaaaaagtaaagaaatataaaatacttttctttctttctttctttcttttttgagacagagttttgctgttgttggccaagctagaatgcaatggtgcgatcttggctcattgcaacctcagcctcccaggttcaagcgattctcctgcctcaccctcccgagtagctgggattacaggcatgcgccaccaggcctggctaattttgtatttttagtagagatggggtttctccatgttggtcaggctggtctcgaactcctgacctcaagtaatccacccacctcagcctcccaaagtgctgggattacaggcgtgagccactgtgcccggctaaaatacctttctagcaacatttagactagtgttttaccaaatgacttcatatagcctagctttgttatcacataagttagccctcatgccactcaatctaagtgatcttcttaaccgctggacccactgcatgggtgaacttttctttttggacatcctcaccatccaaaatccattccacactgtcttctttttgggggagccggtgtgggggatggagtctcgctttgttgtccaggctgtagtgcagtggcccgatctcagctcactgcaaccctccgcctcccaggttcatgcgattctcctgcctcagcctcccgaatagctgggattagaggtgcccgccaccacgcctggctacttttttgtatttttagtagagatgaggtttctccatgttggccaggctggtctcaaactcctgacctcaaatgatctgcccacctcggcctcccaaagtgctgggcttacaggcgtgagccaccacgcctggccccatgctgttttcatgagtcctatcctgctcccccttttagaatgtaagtttcataagatcctatctgcaccgttcacagcctcaagtgataggttttagctcaaaataaaagcaaacacaaacaaaagcaccaaacacccccatatgttgaagaaatgaatcaaatgaatcccaaacaggagaaagggggagtgaaggccaggtgcagtggctcatgcccgtaatcccagcactttgggaggccgaggtaggtggatcacctgaggtcaggagttcgagaccaacctggccaacatggtgaaaccccacctctactaaaaatacaaaaattaactgggcgtggtggtgggcacctgtaatctcagctacttgggaggctgaggcaggagaattgcttgaagctgggaggcggaggttgcagtgagccgagattgtgccactgcactgtagcctgggggacagaaaaaaaaaaaagagaaagaaaagaaaggaggaatgaataagaaaagaaaaaagaaatgagaagaaggatgtgaagtagagtggtggtcttggcagatatcagccgggatagccagtgagttgcaaggcatttgacaggaggctttgtcatttaggagctggatggagtagggtagactgtgaatctatttcgcccatacccctggagttgtggggtgtcttaggaaaagaggctgtggaggcgtgactttcagcctcagtgggtgtttcgtgatgatgtggtgcagagctgggaggctgcatcccaccctccatacagacaccttcccagtccccaaaggaccagaggtgcagtgagaggaggtgctcagggccccagtcccctttagcaacagcgcccctgctctccaaacccaaggctgctgctccccaagcagcgctgtcaccagaaagcactttgtgtgccgtgaccacaaagcccccgcactccctccctaactgctgactcatgtcttcccctccctggggctccagccggaaacactgccctgcctgccagcccctactgcctcctctcgggttcagtcaccagacacagctcaccccaaagcatggattcttggctcaggcccatctagaaacggggtctgggagagtgaggtgaggctgcaggagggcagaagggatgcaaatgaggacaggtaaggatgcaggtgagagggcagagcaggtctgcaggttgatggtgatggcgaatctacaaggacagatgccgggggaggtgcaggtaatgaaaccgcttttgcaaaatcataactgaggaaattatgacgctgaaagaaatcagacctaagcgtctccgtcttgcttctaagcttcaagctgtccttgttctttcctgggcataggccgaactaactttgggaaggaattcagttcatggtttggctctgaaacaaaattggtaacagccctttcccgaaaagaccccctttttgcctggggaccagtctgcctttgcaggactgacaaattagctacaagattagaaattacagtttaggggccatacagcctctggctccaagagtctgaacctccccaaattgctcctggggacaacatcactattgtaaaacctaagatcagtgctccagatatgttgcagaccctgaactcaatggatcagctgacaccatcgagaccagtaatctgacccctccagttctgtgatcccacccaggaacggaagacagaaaacctcacctggaccccctatgattccaacttcaacctcaccaatcaacactcctcacttcccaaacctctacctgccaaactattattattattattattttgagatgaagtctcgctctgtcacccaggctggagtgcagtggcgcaatctcggctcactgcaacctccacctcccgggttcaagcgattctcctgcctcagcctctcaagtagctgggactacaggtgtgcatcaccacgcctggctaatttttgtatttttagtagagacggggtttcatcatgttggccaggctggtctcgaactgctgacctcaggtgatccacctgcctcggcctcccaaagtgttgggattacaggcatgagccactgcgtctggcccaccaaactatctttaaaaccgctgatccccaaatgctcgaggagactgatttgaataataataaaactctggtctcctgcacagcttgttctgcacgaattactctttctccactgcatcccccgtctgataaatcggttctgtctaggcagcgggcaaggtgaacccattgggcagttacagtaagaagataggtaaatctgcaggtgagaatgtaggtgagaatgtgggcaagaacccaagaaaatacctagaaaagcatgcaggtaaagatgcaggtgaggacccagatgaagatgcagagaaaatacactcaccggagaggatgtaggtggaaaaaggtgagaatataggtaacaatgctgttaaggtaaagatacaggtaagcttaagatagagatgtaggtgttggggccaggtgaggatgctaaaaaacaaaaacaaaaaaccctggcggggcacggaggctcacgcctgcaatcccagcactttgggaggccgaggcgggcagatcacctgaggtcaggagttcgagaccggtctggccgacatggtgaaaccccgtctctaataaaaatacaaaaattagccaggtgtggtggccgtgtgcctgtaaccacagctactcgggaggctgaggcaggagaatcgcttgaacccaggaggaggggtcacagtgagccgagatcgcgccattgcactccagcctgggcgacaagagtgaaactccatctcaaaaaaaaaaaaaaaaaaaaaaaaacagaaaaacccacaaaaacaaaacaacaacaacaaaaacccatacatggattcagctgagggtgcagaggagtgagcaggtaaagattcagatgaaaatattggtaacattgggagcagggagaacattagggaaaagacctaatgcatcctggacgtaataactaggtaatagggggctgggtgtgatggctcacgcctgtaatcccagcactttgggaggccaaggcgggcggatcgcttgagatcaggagttcaagaccagcctggccaacatggtgaaaccccgtctctaccaaaaatacaaaaattacccaggcaaggtggcgggcgcctgtaatcccacctactcaggaggctaaggcaggagaatcacttgaacccgggaggtggaggttgcagtgagccgagattgtgccactgcactccagcctgggcgacagaacaagactctgcctcaaaacacacaaacaaaaaacctaggtgatgggttgataggtgcaggaaaccaccatggcacacttgacctatgtaacaaacctgcacatcctgcacatgtaccccggaacttaaaatagtaataataataaaataaaaaaaaattggtaagattaacaggtgaggatgccggtaagtgaagaggtgaaggggctgtgagctgccggtgagtgtgcaggtgaaatggaggtgaggcgcaggtgcatgccacgtgcaggtgaggcaggtccatgctccttggctaaagaagtcagcacactagcaggcgaacgccaggagaaaatgcggtgggaacaggtgaggtttcaagtaggatggagctgagctgcaggtgaggcggctggggatttcagcctctccctcttggcaaagaactccagacacgtgagatataactgaagctttatctggagtgggggaatgggggtgtggtcagttggggcacccaaagacaaccatgctctcggtgaaggcgccgaggtcctggcattgtttctggttctcttcgtcttggcattcgtcctcctcgggccagtgctccacccaagtgtccttcccgatgatgtagctgaggctggagggaagaatggcaggtcaggaaggggcgtggtgtgggcgtggcgcaggggcgtgacaatggtgtgggcgtggcatgggcggggcagtcgggcggtcgcgcgcacgcgcagggaaagcactcacttgggcttctctccccagaaatcggaggagagaccccacatgaggtagtgtttcttctcctccagcttcagggcttctctgcacttgatggggctgatgaacgtgcgctgctgtccaacctgcacctcatccgagcctggagtggaggggagagggaagaagctgagtcgtggggaggaagccagggaagagccacgggaggcagcgtgctgagcctgacctgacttgatggtctgctcaatggccatgatgtactcgtcaaagtcattggacagctgaaccttgaccagtcgggtcttgtacactgtgggggagaggcagacagtttgggtggtgggctaggttgaccatgaggggcaccctggtttgcaagtgcacccgggcatgtggctctctctcccaagcagaaagttgcagaatcacagccagtcacactatggcccacccctcattacacacacaaccatagagggtcccatgtcaccatccacacacagtcgtgctcataggcatgcacagaggtcacagccacccacaatgtctagtaacatactattcatactatgcaatgagagtgactcatatgcacaaaatactgtagcctcatggccatgcacacaaccatagccacggaaaactacagtcatatacgtaacttcaggacctcacactcactgccatctacaaccacacagcctcacacaaccacagccacacacaactacaacctcacagccacccacgcaatgatgcatacaaccacatctaccttttctcacatgagcatacctaggccactcacagtcatggttccccacacaatcatggcccctcacaatacatgctctcacacacaccacagtcacccacacccacagcctgaagccacaccatgacaaccacacctaccacccaccacacaattggacacacacagctaaacatgcgtgacccccacccatcacccactcaccatagtccactcctggctcacaggccttgtccagccgttcttccagggtgaccttgtcatccgacttttgtatgaagcaattctctgcagggtggggtggagacagggtctaagtcccactccttatctggggcctactgcccatgggtgtggccagccctgggagcctaccccccttggtatcccctgggtatgggtctgggggtccctgaccatgggatagatgacctgggtaagtgtggcttgctcagacccacctgttcccggctccagggaactcaccctcagcacagcggcacagttcatcacggcagagcttgttcagctttccatcctccttttccggatggtagaaccgggtacagctttcctctgcgggcagatgtgatgtgaagatgagaggataagggcctccctccaaagaccatgcctgggaggcccagatccccagttctcagtcttcagacctggagatgctaggtcttcaacccctcagatccctcagaccccaagaccccctctactttctgatctttgggattctcagacccttgagtctcttagactctcaactcacagaagcctgggaccctcagaccccaaattcatagattcctgggacacgcaggcctccaaccctcatatatctagaatccttagacccttattttcagaaccccctgcaactcacatattcctaagaccctgagacccctgaacccatcagacccccaagtctcagatccctagaaccaactcatagatccttgggactctcagaccctgggaccttcagattactaatcctgaaatccctggcctgcttagaccatcattctcagatcccctcagaacctcagaacctcaactcatagatccttgggaccctcagacccgtgggaccttcatactacgaatgctcaaatccctggactccttagaccttcattctcagatccccacaattcatatatacctgggactctcaggcccctggaaccatcagaccccaggccctaggttggctgctcacccaggttgtaataggcgtagaccttgactgctccaggctggataagctctacattaaagtattggtgaactttgaaagctagacagtcatcctcagagtgtgagacctgagggggaaggaggagcttggtcagtggggtgatgtgggagggagtccagcattgtcttgggagctgaggcagtggtggagaaactgaaggatcaaggaggaagtggcaaagatgaatgagcaattcagcaaatccatttacttttcttcctagactcacagtgagactacctttctcagctcctctttcaattaggtgtggccaggtggctgaacagattgctatctatgcccataaaaacaacccatgcacaatcttatttccatctagaatgaatgaatcctgcagagaactacagaagatcctaaggattgcagagccacaggatggaaggtgcttggatccctgagagactacatggagcagagggacccttccttaccccccatgccaactggactttacatgagtgagaaatacaagtctgttgtgttaagaccccatattcttaggggttttgttttagtagctattgttacttaagctgactaaaatgggattgaggggccctgtgggtatcaggagttagcagggaggatatggggataggagaatgggaagaaataagagaagggagaggagaaagcccaaatcatggtagagatgaaagagtcagagaatgccagatggagagaaaataacagaagaggtggcaggtgtggtggctcatgcttggaatcccagccctttgggaggctgaggcaggaagatcgcttgaggccagtagtttgagaccaacttgagcaacatatcaagacccccatctctacaaaaaataaaacaatcagctgggtacttacacagaatatttatgaagaaacaagaacaaaaattcagctggggccaggcaccaggggcttatgcctgtaatctcagcactttaggaggctgaggtgggagaatcacttgagctcaggagtttaagaccagcctaggcagtacagtgggaccccatatctacaaactttttttttttttaattcactgggcatggtggcatgcacctgtaatcacagctactcaggaagcagaggtgggaggatcatgtaagcctgggaggtcaaggctgcagttaaaaaaaaaaaaaaaaaaaagctgggtacaaaagcataatatttatgaaaaaaaaattagctgggtgcagtgtcgcaggcctgcagttccagctcctcaggtggctgaggcaggaggatcccttgagcccaggaatttgactttgcagtgagctagtatcaagacactgtactccagtctgggtgacagagcaagaccctgtctcctgaaagaaagaaaacaacagaagagagaaatagatcaaagaaagaaacaaagcccaggattgggttagggaacgaggcaagaccttgctctctacaaagcacttaaaaaaaaaaccaaaaaaaccaaaagggctttttttcaatggttgtttaagactctgataacaagttggaggaggcaaatggtcagaagatgagatgtttatagaagatgctgggttgacccccttattttacaagctccttcccctacaactcagcagcacagaccctgtctcctctggcccagggttagtctgacccagagacaaaagctgaaaggaaaagaaagaccagccagatagaggtcagggtgcccctggaagcctcccaggggaggatgatgcagccttaccttgtccaggtagatgatgagggtgttcctatcggagaaggctttgtccagctcatacttggagatgtatctgtcaacaccattggccagctggggaaaggtggagcctgtgaaaaatccctcctggacccctctctccctgcagcctcttccagaacccaggctcctttccacttatcccagctcctgagcccttcatacctgcttcaggtcatctgtgtctggagcaaagccagtcatcatggatatgtccaatatagacatagtggcatcctggtctccccggtacctggatagtgcagaaagaagggcattgggtcccaaggaggggtcagccccaagggtctgttcctggacaaggaggtctgatcaggcactgagacttctgattcccacatagcagcacagaggggcgttacattttttaggaaacatttccccaaaggaaataaaaagcaaggtaatgtaatggtcaaggtgattaagagctcagactctgcacccaactgcatggattcaaattccagctctaaataacattggatgcattatttgaccctccatgcttcagttctagaaaacaaggcaagaatacaggcagccctcactctgcatgattcagttaaataacactagtagcccagtgacatggttctttttcagtaccttggtatattgatcacgagtagttgcatatggtataaactttgttgctaactcttcagtctagaaatcacgacataaataaaagataagcatcataattgagggccaattactgtcactcctttcaaagtccatcagtgattggtcactgagcttctgctcttcaatttatgcacagacagcaaagtgtgtagttctgttgcctccctgtctccaggtggctaactcccatgagattttacaacaatgtatcacgaaaagagggaactggccaacaaagataaaaatgcagcaaagaaatgaaaagtgataatgccagaagtgaacttcaaagacagcataaatggagttatcaaagaatagcagactatggtgatgttgaccctgctgccatttgagagataggtagtgtagaggaactcagggaaggcaaatgtattagcataaataaggaaggtcatggggacaaaaaggatgaagatgtcccagaggaagggacattatagaatacaaagtcactttaaaggaactcttggaggaattttgtgtcatggaaagctcaaaggataaaatattggaagctgatccaaacttagaaaggagcaagacaaggtactaaggcatagaaaagatgtttactccatgttgtaaattatacaaagagaagaaggcaagcatttttttgaactaaagtactctccgtaagtgtcatacaaaggaaaaaaaaaacaacaaatacaccttgcatctcaatgttctaatgttttaaattacggtgtagtcaaatactcatcttactatgaatttcatttccctgtatctttattttgttttattctattttttttttttttttttttttgagacagagtcttgctctttcgcccaggctggagtgcagtggcgtgatctcagctcactgcaagctccgcctcctgggttcacgccattcttctgcctcagcctcccaagtagctgggactacaggcacccgccaccatgcccggctaatttttttgtatttttagtagagacggtgtttcaccgtgttagccaggatggtctcgatctcctgacctcgtgatctgcccgcctcagcctcccaaagtgctgggattacaggcgcgagccgccacacccggccatttccctgtatctttataactggcagtatgataattttaaatgttgtaatagaaacatttaggctgggcatagtggctcatgcttgtgatcccaaaactttggcagcccaaggcagaggaatgctcaaggctaggagttcgagaccagcctgggcaacacagtgaggccctgcctctagaaagaataaaaaataaaaatcagccaggtgtcatggcacacgcctgtagtcccagctacttgagtggctgaggcaggaggatcgcttgagccagggagtttgaggttacagtgagctatgattgtgccactgcactccagcctggctgacagagcaagaccctatctctctaaaaagaaaaaaagaaaactttaaaggtcatggaatgattgtgtactttcctccattgattactaagatgctttgacagtctcagcttacgtggtcattgctgtggtctcacattaacatgcaaagcaaggactgtctgtgttgtctacctcatggtggatacttagaacagtatcagatacacagtgtacttggaaagtactgaatatcatggatattatttgcaagaattcttgctagagatagagggatggccaagatgaaccccggtgacctagcttcttacctggtacagatctcaaggatcatagtgttcttggcatcctgaggcctcttttctagaaacacagaagagagaaagatgggagagggtatacctgtgtgttgattcaggagcggggaagacattagaagaggggtaggaggaaggtgacagataaggccttgattccttttacctgtttccggtgctggttttatggtgaccttgaggtcgaatttattacaggtgagttgatctttggccttagcatggtacattgtcaccacctggtaagatgggagaggagacacaatgtcagcccacaggactaggactgctggggacaagaggagatggtccctctggggcagaggggcatgggccaggcaggtgtgggtttctgttccttaccgacaaggtgccttggccttttccttcagctgtgactgtgaaaccctcattttccttggtctgcagagtgaaaagagagaagagagcatgttgggaattaagccttctgctgcctgtgatggtcacctggccctccctcttgcttcccagtaaaccctggctagtgtagggggagacagccagagtgaggagggcttggctgggtgactgtacctcttctgatcgcaggaggctggcagattcccagtggatacggtgggtgatcttggagctgcggctgggcagttggagggacacatcaaggttcagttcctggtggtcaggggcgtccttttggtattgagccaaggcttggaacaccatgaaggtggcctagaacccacaagagagaaagatggtgatctgggagcctgggaaagtggctagaatccagtgggggataaagaggttcaaatcagagctgggacatcaaaatgtggcctagaacctactagagagtgcaggggtgataactggaggtcactggactctgaggacatgttcagaactctccgagagacagaaacttacaccaggacttggagatgctgagaacatgtctagaatccatcagaaagtccaaatgtaagactgaatgtctagcgaccctgaggatgcagtctagacccatcaagaggagagagtcttagaccagggcttggagacactgagaatatgtctagaacccactcatgaagaacagaatgaaaccgtagccagaggatactgagcatataatctacaacccaagagtgacactgtaacactgagaacgtgagtgacagaccaccagaaagaaaggaggccaactggagcctgaagttgctgaagcctgaagttactgaaaccatggcctagaagagggtttgcgtaatgccccagggtaactgggaacatactatagagcccgccagtgaggcaatgtgacattgggagcctggtagaactgggaacatggtctagaacccaccagcaagacagggtaagattgtgagatagaactgggaacctggtctagagcccaccaggtggagagagaggcttagacctgaacctgggccctgagaacatgatctagacacctggggcaagaagaaggctcaacacacagcttggagtacccagattgtattctagaacctatagatgggtttgcaagtaataaaaactgattctcaactccactgcaatcacactggctcgtgggaatgaagaactgcctcgctgggcctcagtgtcttctctaggaggccagtgggaagccgcaggagacagggatgcatgtgcctaggggctgtgggcccacttgcctgggtagagccatagccaccaccgtagtatctctgttcattgagccaacgcacgacgggaggcacaaagtcaaagtcttttagctgcagtagggccaagagggcataggatgtggcctccacgttgtagagctgcttaccagggtcctcccagcggttcttatctgcaaagaagataccccatccccagtgctcactgctctgtccagcctggggatggctcagagaaagctcagaaagagatgcatgctagacttcctggtgtttgggtgtcctggctgacattcgaggctctcaattacttggctcctgccttacctctcttgtttcatcaactctcacttctccctttgaaatgaatgcttaatacgcatttgttgaataaatgacgcaacaaactttctcgtgtggtttacaatgaggacctgcgaaaacttagagccgtgcatcccagctcagctcagggttatgcatcccagcttgataccttaggactatccatctcagcttggcttagggtcatctgtcccagctcagctaaaagccatgcatcccagctcagtatctcccgccctgaacttcagccatgcatctcccttcacccctccaggccaaccctcacctttggctgtggtcagaaatttgttaagaagaggccccttcagcctgcccatctgggccagagcatagccagcaatggccacagtgtaggatctctgtaggttcatgtagttggcttcaaggaagtctcctgctttagtgatgctgcctggcaggctctatgagaaagaggatcagattctccggtcatgtgggcattgctgtcacgttagtaaggatcattcgagcagcacttcctgagcatcagggatttctgtccttgggacacacctgtcttagatttgtccatttttgagaatttcccagatattttagccaccatgagctgccttgttgctgcatatctattatgtatctggagaaatccacgtaccccgtggtgtgctggtaaaagtttaacagccagctctccagtgggagggttgagggatccttggtttataatgatttacaatttctgtggtgtaaatactcccaccaggggccaatttcacggtgtcaatgcgacatcactgaacaaagtcctggggagacattctccaaattgttactcataaactagtatgcgccagattcagtataccactgtgaacacctcatccagtcatcatcatcatcgtcatcatcatctttatcttcttcatcatcatagctcacacttactttgtgtcattcagatacccacacatttaatctcataaaacctgatgagcatactgagccctgagagatgcagtaattttgcaaagaccacctaggaaataagtggcagagttaggatccaaacacagccttctggggatgggggaagacatgatttgtactgttttctcatttccatgatgtaaatacttccatcactgatttcaacctaccaatatggtgtcgttgaatgtagagttgggaagagctttgcagtaccacagtattatatagtattttcactatacagatccaacagacataagtaaccccaagagtatagattatgggagtaaggcgtttaggaagcgatgagtttgagtgtttctaacctttgtgtttaatataatttatttaactgtaacttttataactttgtttgtttggttggttggttgggttttttgttgttgcttttttttttttttgagacggagtcttgctctgtcgcccacgctggagtgcagtggcgcgatctcggctcactgcaagctccgcctctcgggttcaagtgattctcctgcctcagccttcccagtagctgggactacaggcgtccgccaccgcgcccggctaattttttgtatttttagtagagacggggtttcaccgtggtctcgatctcctgacctcgtgatccgcccacctcggcctcccaaagtgctgggattacaggcgtgagccaccgcgcctggccttttttttgagacggagtctcgctctggcccaggctggagtgcatggcgcaatctcggctcactgcaacctccgcctcccgggttcaagcgattcttgtgccttagcctcctgcgtagctgggattacaggcgcccccctccaccatgcccggctaatttttgtatttttagtagagacggggttttgccatgttggccagggtggttttgaactcctgacctcaggtgatctgccggccttggcttcccaaagtgccgggattacaggctcactgtgcctggcctaatatttagtttttaataataattgtatttaatgaccagcttgaaaaattcctggaaatttaacactgggctccagcaagctagttatagcacactttttttttttttgaaaaggagtcttgctgtgttgcccaggctggagtgcagtggcgcaatctcggctcactgcaacctccacctccctggttcaagtgattctcctgcctcagcatcttgagtagttgggattacagcacactcttgaccccaggagtctggtttcacagcctgtgctatactctgctacaatgttgctatgttgtagcagaaacaaatctcttttattcctgcccatttgcctctctgacatccactccttttgtaagaacttcttctcccttccattcacgtggccacagtggaaacagccatgtctgccccctgagacctacttcctgtccttagctgattggtccagatatagtcatctgacccaggctgagccaatcagagtcctttcctgggaatatggcggccctaaccttgatctgatattttctctaaggaaggcagccatattctgcctgaactgaattattggccaagaacggaatgaagatcacgggagagaggagcaaagcatcctggcagagtccctgaggccaccttcatctctatttgatgccttggtgcctgcacataaattccccatcaatttttgtataatctgggtcacatgtgtgttatatctgggacaactcagaggcctaaaaatacagagatcgttatttattatccccaatttacagatgcacatcctgagtgaggctcaagggtggaagtgcccatgagtcaggatttgaagtcagatttgtctgaccccacctctcctctctctctctctctctctctctacctacctccctccctccctccctccctccctccctccctctctctctctctctctctctctctctgccttggtccctcttgggtgttagaggcaacagccctgtgtttgtttttctcttcactggcccctcccctccatctcttttcctaaggggggagaagccactagctgagggtggaatcctgggcttcccacttggaaagctaaacgttaaacaacccactcaaaaccccacgatcagctaggtgcagtgactcacgcctgtaatccgagcactttgggaggctaaggtgggtggatcacttgaggtcaggagttcgaaaccagcctggccaacatggtgaaaccccatctctactaaaaatacaacaattaggctgggtgcagtggctcatgcctgtaatcccagcactttgggaggccacgccaggcagatcacctgaggtcaggagttcgagaccagcctggccaatatggtgaaacctcatgtctactaaaaagacaaaaattagccgggtatggtggcgggtgcctgtaatcccagatgctctggaggctgaaacagtaaagtcccttgaacctgggaggcaaagggtgcagtgagctgagatcatgccactgcattgcagcctgggcgacagagtgagactccatcacaaaaaataaacaaacaaacaaacaaccacaataaagcagacaaaggcattccagactctcagcggcccatctttccaagcttccctgcttcagaatcaaaaccagaggaaaaagagacagtgatgagccaacagtgttcaccgtttcctgtttggagtcacggatccctttgaaaatcacctgaaagatcctctggactaaggaaatagtcttagctctgtatcccaagttttctttaaggaagtagcaagtacgcaactgtactgatcatgtagcactgatgtagaaagcacttttggaaatgggctgaaaaccctctgaaaattgtaaggcagacagaaagaatccccacctttgatctctttgtgcctcagttttctcatctgcaaactggggataataagagtgacttacctttcaggctgctaaaaggattatgagacttaacatgtgaaactattagagggcgggtctgtattagatgagttaagtgctcaaaagatgttagctattaacatgactgcagtgatgtctgttattgcactgggagagctgcaaattccctgaaggcaacctctcactctccaaggtggctgtgctctgcatcgggtaaggtagggtagggtgggaagatggagggcacttacgttgacctgctcctcgcaaatatctttagcctcctgcagcgagatgagaacaaaggccgtgagggccatgtctttctcgttgttgttccgtaatccaccctgagatagagagcagaaagcaaggatggggtcaccggtgtgtccacacatggcagtcatccccccttgcagattcagaatcagggggtctgggcagggctgagtctcttctaggtgttaccccgctaccctaggaaggtcaaacttcttagtattaattcatgcaacaatttgttccttctgcaaatgtcaatgtacaatgtgcaatgtacaatgggtacaacggtctgatccattgtaaaaccagacacaggctctagccctcacagagcttttgtctagtagggaagatggacatggtccatccagctcctcaagagatatacactttttttttttttttttgggacagttttgctcttgttgcccaggctggagtgcaatggcgcaatctcgactccctgcaacctccgcctcctggattcaagcaattctcctgcctcagcctccgaagtagctgggattacaagcatgcaccaccacaccaagctaatttttttgtatttagtagagatggggtttcccctgttggtcaggctggtcccgaactcctgacctcaggtgatccacctgcctcggcctcccacagtgctgggattacaggcatgagccactgcgcccagccaagagatatatacttataagtggatgagttctgtgcaagggaaagaggacatcgcagcgataatgaactgtgggagtgtgacccagttggggaggtcagaaaaagtgtccctgagggagtcaactctcacagacggcagggattagcatactaggtggcagaaacagcatgtgcaaaggccctgtagaacaatagagcaaggctcctatcaatggatggagcctggaaagaaaagaaaggctggaagtctggaagcctgaaaggtgagactgaggcagtgattctccatctcaagcacacattagcatcacctggaggaatgcgggcacttttaaaaactcagattcctaggccgggcgcggtggctcatgcctgtaatcccagcactttgggaggccaaggtgggcggatcacctgaggtcaggagttcaagaccagcctggccaacatggtgaaaccccgtctctactaaaaatacaaaaatcagctgggcatggtggagcgggcacctgtaatcccagctactgaggaggttgaggtaggagaattgcttgaacctgggaggtggaggttgcagtgagccaagatcgggccattgcactccagcctgggtgacaagagcaaaactccatctcaaacacacacacacacacacacacacacacacacacacacacacacactcacacccctcagattcctgggtcctgcccctagaatttctgattcagtgagtctggggtccggtctcagaatatgttttgtttttgagacagggtctcactctgttatcagcctggagtgcagtgtcatgatcatggctcactgcagcctcgacctcctgggctcaagccatcctcctgcctcggcctcccaaagcgctgggattacaggcatgggccgtcgagcccagccacagaatgcacatttttagtaagtcatgggtgctgttgctgccgctggtctgaggatcacacttcgagaaccagtgctcgaaggagttttgtgtttaagtgccacagggggagccacgggactttctaagaactgatccagctggatttgaaaaaatcaccccaactgctatgtggtgagtgtctgagagccaacaaaagtgggaggccaccaggatgatgaccaggaggtggtttctacaaggtctccaaataaggaggggcggggagagtgttgcttggaccaggggctggccataaggatggagagaaggaggtgattcttataacatcatgggagaatgcaggtgttgatggattgaatgtgagaaagggattcccaggcaggacccctgcacttggtttaatgaaattcttaataatttctgagcgaggggccgtgtctcttcattttgcgctgggcttcgcaggtctctggtttttgcaatgctggagtgacgcctctggctcatatatctgcctgcccccaccccccagcccaatctttgcaaagggaattgggcagtgggcacatggaggtggggctctctctcgtgttcatcctgcgagactcaggagcccctctcttccattttgccctaaatcccagcctcttacaatcatttcttggtgtatcacgggcgcatcctcctggaagaccccgtcgggcttctgcttctccaggatcagccatttaacagccccgcagaggacttgggagtcgatggcgatgaggttgacagccagagagaagaccttgaccacgtaggcggtcagcctggagtgggcacagagcatgagccaatcggctctgagatccagagactgccatgtcaaccagccaatgagcgtgggggagggaccagggcctggcccagtttgcctggtttgccttcccaggccccaggacccagctgttgtatgcggtccgtgcttaaggatgcttaatgaccgccggccactcagccagcgcttgcctggactctgcaggtccagggctgtttgggcaaggctggcctaagggaccacccctggccagggtccgggccctgctgggggttgagggtggggagtatgcatggcctgagctggctgttgggactcaccaggtgctgggtgcccgtttcacgaaggccgcaaaggcagagctgggttgtctgaaggccagctgctgggtgtaccctgcagagaagagagaggaacccccaaaagagccggggctgagcagagggggcacgccagaaagggcaggggcggggtgcagagaggggacaggggctcagggtggcggaggggttctgggaggaggggaccttaaaaagggaaggactcaaagagggtgggggatcagaacgaggaggtggaaaagttctcaagaggacaagggattcagagaggagaaggatattgagggtggggggctttcagggaggggagggctctcagagagggggtggagtctcagggaagaggcatggcctggagaggacgtggggcctcagatgagagtggctgggacaggaggtggcgcctcacagaagggtgtggccttgagaagatgtggggacccaggggatgggcgtggccttgaaaagaggcagggtctcgagattctggcctgggaggagtcagggcctcagagggcgtggccttgagaagaggtgggaggccctcaggggatgggcatggccttgaggagaggcggggtctcatgaagagcctggcctgggaggagtcagggcctcagagggcgtggccttgagaagaggtggggggccctcaggggatgggcatggccttgaggagaggcggggtctcatgaagagcctggcctgggaggagtcagggcctcagagggcgtggccttgagaagaggtggggggccctcaggggatgggcatggccttgaggagaggcggggtctcatgaaaagcctggcctgggaggagtcagggcctcagagggcgtagccttgagaagaggtggggcctcaaatgaggggagtggctaggagagaaggtggagcctcaggggagggcgtggtcttgagatgaggtgggatcttaggggagggatgcgctcggaaaggggtccctggggtctccaagaggggcagggagcccacccttcttgatgagctccaaggccccctgccgcttctctaggccgaacttctcccactgctccgtttcatccaggtaatgcacagcgatgaccgtgggcgtcatgccgatcatgttctgttccccgcagcccgagggggtcacaatgaggtgcttcagccgttccgcgtcgacggcatcctctgtcatctgggccactggggtccctgcagcaggtgggaagaggacgttgctcaagccaggtgggtgacccaccttggggtggcgtgaaaagggttccagcctcccaaccagccagggccaaggggttagggacaggcgaggactggggaggatgtgactgcggggaggggaggctgcatggctgagtggctgttcgggggtctgcactgttaggagtgggaggtgcttcacaggggcaccctggtccttgggtctcatttcaccagcagtaaaataattccagtaacaatattcaggaatacttatatcacgcttaatgttactttccagactgttctaagagaataccatagagtgtctcacttaatagtcaacgaggctgggcgccgtggctgaagcctgtaatctcagcactttgggaggctggggtgggtggatcacctgaggtcaggagttcaagaccagcctgaccaatatggtgaaacaccgtctctactaaaaatacaaaaattagtgggcatggtggcgggcgcctgtagtcccagctacttgggaggctgaggcacaagaatcacttgaacccgggaggctggggttgcagtgagccgagatcacgccactgcactctagcctggcgacagagtgagactccgcctcaaaaaaaaaaaaaaaatcatcacaccaacccttggaggtagatactattattctacccctaccaaaggtgaaaaaaccaaggctcttgccccaaagccttatagcttacaggttgcaagtccctttctttctccagtcttccctcctggggcaagaaatgacctccagaatttctgctcttgtactatgttgcttgtctttttgtttgtttgtttgtttgtttttgtttgagacaaagtcttgctctgccgcccaggctggagtgcagtggcctgatctcggcttactgcaacctacgcctcccacgttcaatcgattatcctgcttcagcctcccgagtggctgggattacaggcatgtgccaccacgcccagctaacttttgtatttttagtagagacagggtttcaccatgttggccaggctggtctcaaactcctacctcaggtggtctgcctgcctcggcctcccaaagtgctgggattacaggctattgagtctcatttaagctggtttcccatctaagaagcacagaaggtctagaaaaattaaaataaactgatgtatcagcgaaagctctttgctgaactaaatgctatctggaggcttctataaaaccgatcatagcaaataatatctgtatggttaaaaaaatttttaggccgggcataatggctcatgcctgtaatcccagcactttgggaggctgaggcgggtggatcacgaggtcaggagatcgagaccatcctggctaacacggtgaaaccctgtctctactaaaaatacaaaaaaattagccgggcgtggtggcgggtggctgtagtcccagctactcgggaggctgaggcaggagaatggcgtgaacccgggaggcggagcttgcagcgagctgaggtcgcgccactgcactccagcctgggtgacagagccagactctgtctcaaaaaaaaaaaaaaaaaaaaatgtaaaagagggaaaacagatcacagatgggctgttctagctgaaggggaagagaaaggtgcgggttaaacacctccagaatgagatggaatttggctccatccatgccctcctgggacccatggggtcggggtcaagggtgtctcaccttgcaggagaattctggtctcagactcggtgtccgggacttggtcactgaggtctgcaggtgggatgtcctctttctgcactccttctgcagggtgagtgagagataccgatggctctagctccctcccgccctatcctacctcactaaacccaggtcatttaccccccttaccctgccagcccctcagcccctccccctgcagccgactcaccacggcccaggcgttctggatccagggtgcgaacagccacagttttgttcattctgattccttccggctacgcagtgttagaggtggggggagtcgttggatgaataaaagaacagacagacacacagatggtcagcagggcactgtccttaggatcaccctagcattgccgggcgcggtggctcgtgcctgtgatcctagcactttgggaggccgaggtgggtggatcacgaggtcagaagatcgagaccatcctggctaacacagtgaaaccctgtctctactaaaaatacaaaaaaattagccgggcgtggtggctggcgcctgtagtcccagctactcgggaggctgaggcaggaggatggcgtgaacccgggaggcggatattgcagtgagctgagatcgcgccactgcactccagcctggggaacagagtgagactctgtctcaaaaaaataaacaaacaaataaataaataaataaaaaatttcaaatcgagtataaaaaaattattgattggtgatggtcgacgaggtttttggcaccacctaaaattctaagcctggggtcatctcactcactttaccccaatcctggctctgcttctgaaattctgggacttccaaatttcctaagctggacactatgattcttagtgtctcagagcctggatctccaacctgagtcaatagtacgaagaccaggagccctctctgaaggacaagggtttgtgggtgccccaagcactcaccacgaccttcagggacttcctgacaccgtcactgatgaaatgatggtagacagcagccttgacttccacttcctgcaggccggtctttagcggcacgatgacatatggaacggacaacgaggacttgggggggatggttacggtctgctggtgacgcctcttggtggtggccaggctgcagaaggctggattgtggagtagttccaccctcacctgccagggagagaaaggatccgggcaagtgtgtgtgcaacaggctacctaccccctggcagcctccaagaagcctctgccaccccgggacccaccttgagctcttggttctgccggtaattgtagagaacggctcggatttccacctgctcgtttcgaacaacagagtagggtagccgcaggtcgatgaagaagtcctgcattactgtgacctcgaaggggtctgccacacagatccctgctcgggcagagacagaacacggagtgtcaaggtcggggagtggacaaggccaggctcctgggtctcagctcttagtccactccgcaggagctctccctaactcagcctgtctttgctgaagcctgtgaactaaacgctgtcaatggcgacaaatgacagatgatgatggtggtggctgggagttaccattatttattattattattattattattattattattattattaattatttgagacagagcaagactctgtcgccaggctggagtgcagtggcgccatctcggctcaacgcaacctccgcctcctgggttcaagcaattctcctgcctcagcctctcgagtagctgggactgcaggcacgcaccaccatgtccagctaatttttgtatatttagtagagatggggtttcaccatgttggccaggatggtctcgatctcttgacctcacgatccacccgcctcagcctcccaagtgctgagattacaggcgtgagccactgcgcctggccggagttaccactatttaatgatttacattctgtttgtagtttgactcagagatctacgtgtagggaggaagagaaatctccaaaatatatctgcttgtctgatatggtagccccaagctgtgggggagcgctgagcacttgaaatggggtttgcctgagtgagaaactggatttgtacttttatttgatgtacttgtatttaaatgtatttaatttaattcagacttaaactttaaacctgatgatctagctaggtgcggtggctcatgcctgtaatcacagcactttgggaggctgaggcaggaggattgcttgagcccaggagttcaaggctgcagtgagctatgatcgcaccactgtgctccagcctgggcaacagagtgagatcctgtctgtaaaaccaaacccaatgaaacaaaacaaacaactgatgctcattttaaatatatgaaacaccactgaattatatattttattattttttatttatttattttttgagatggggtctcgctctgtcacccaggctggagtgcagtggcgtgatcttggctcactacaacctctatatcctgggttcaagcaattctcctgcctcagcctcctgagtagctgggattacaggcacccacccgcatgtcctgctaattttttgtatttttagtagagacagggtttcaccatgttggccaggctgttctccacctcctgacctcaggtgatctgcctgcctgggcctcccaaagtgctgggattacaggtgtgagccaccgtgcccgacctgagttgtacattttaaaagggtgacatatagtaagtgaattaaatcttaattttttaaaaatgatgattgagtggaaaacgtttaagtatttttgcaactacttgagtatgaggatctaccttttctttctcttttcttttcttttcttttttttttttgtagagacggggctttgccatgttgcccaggctggtctcaaactccgacctcaaatgatttgccggcctcagcctctgaaagtaatgggattacaggcttgagcctttgcacccggcctgagaatctaccttttcaactgtaaattttatgaaacctaaaatacagatcaaagtatttccagtgaaaacctagcatcctgcgctgggcgcggtggctcacgcctgtaattccagcactctgggaggctgaggaaggcagattgcttgaggccaggagtttgagaccagcctggccaacatggtgacaccctgtctctactaaaaaaagaaaacttagcatcctgtttacaccactgcactccatcctaggtgacagagcaagctcctgtatcaaaaaaaaaaaagaaagaaaatctagtatcctaaatgagatgcactgaattgtaaaacacatgctggattttgaagacttagtgcaaacagaagtaaaatatatcatcagtaattttgatatactagtagattattatcaaatattaaaaggttatagtcacattattagtgggttgtggttttgcaactttttacaaaatgttgaaatgatactattttgggtatatttaaattaaatagaatgttttgtaataagttatgatatggtataattatagatatgtaatcaataataaatgatacatcatttatattatatatctaataaaatatacattatatatgttaacatgtcaacaataacaaatgacatattagtagtaaattataattatacattacaacaaaattaaattataataaattatggtttattataatgtattaaattataatgaattatggtttattataattcattaaattatattataattaaatttcttataaattataatacatattatatgtttacataatatattacatgtgtaatatgtatatattacatatatattatatatgtaatatacaatatataatatattatatatgtaatatgcaacatataacatattatatatgtgatatgcaatatatattatatgtaatataacatattacatgtaatatgtaatatatgatatatatgtaatatgatatattatatatgtaatatatgatatatatgtaatatgatatattatatatgtaatatatgatatatgtaatatgatatatgtaatatatatgttatatatgtaatatataatatatgtaatatgatatattatatatgtaatatataatatatgtaatatgatatattatatatgtaatatataatatatgtaatatatgatatattatatatgtaatatataatatatgatatattatatatgtaatatataatatatgatatattatatatgtaatatataatatatgatatattatatatgtaatatataatatatgatatattatatatgtaatatgtggtatgttatatatgtaatatgtggtatataatatattgcatatgtaatatgtgatatgtagatatgaaatatattatgtaatatataattatatattataattataaacattacaattaataaatatataaataaatattataattaaatttattataaattataataaaccatataaattatggctggatgaccgagtgagactccttctcaaaaacaaaagaaagaaagaaaagcatcaattttagagactgtacccccaccctgtctagcttttgacactgttagagtaggcagataggcggaaatgagcaggcaggggagctttctgggaaaagaagtcccagacaggctgcctactgacagcgctgctcactggcagtcagcgaaaaggacgatggctactttagctacacatggccttgtggttggggtcctctggccctgaaggggacttatcaggtcctagctggaaataactttgctagggattttccccgatgatgagcatgtgcactgctccgaaaacaccctagagttgtgttttgctcattatcatagtaaaaaacacacctctgggtggagattttcgatgctaatgagacatgccacgtgcatgctagtacctacagccacagagcctgctcgcccaaagagacctcccaaaacatgcttacaagtgacacccactcacgccccttcacgaaaaatcatgtaagagtctcataaaaagagtctaccagcagtatctgctgctggctcgttctgttgagcagccatgtctgtgtcgtctttcagagcatacggtcactttttatttatttagagaaggagttttgctcttgttgcccaggctggagtgcagtggcacaatctcagctcaccgcaacctccacctcccgggttcaaccaaatctcctgcctcagcctcccgagtagctgggattataggcgcccgccaccccctgcctggctaattgttttgtactttcagtagagacggggtttcaccacgttgaccaggctggtcttgaactcctgacctgaagtgattcccctgcctcagcctcccaaagtgctgggattataggtgtgagccatcgaggctggccctgtctctttaaataagcattgctactactatttttccagggggaccagcccagagctgtttcttccttcaataaactctgctacttaacccttgctatgtgactcttggctgaattctttcttccaagttagacaggaactaaggattcccacagttcctggtaacaacacctctgtggtaaccagggcagagaataaagtgccaagaaacatagggttgattgagtttggataaaatgagatgacactcagacaccctggggtccctgcctcccggggaccagccagcatcctctctcacctttcttgtccgacatgctcacagccagaatctcccacgtggtgatggagtctttcaaaaatatattcatgagcttcgtagagattctggatggagaagaggttggggtattaggagatgtcatctagcagggtggtagaggggaagaactggtgcagagggaccccaagggacaggctggaagggtctgggggtgcctccatgtaggtcacccaattcctgatttttctaggttgggctgtggggttgcactgtgattccagagaagaccagagatagcaggtgcatgcaaattaaacggtctgactctggggtgggttgtaccgggggtaccccggccttacccatttttcggtggctctttcaagtcctcaacgttccacagccagctctctgggaactcacttcgggaaacgatgttctcttctgcaatgatgtcctcatccaggttacctgcagggggtttagatctgcatttagaacagagcaggccagttgccatggctcatgcctgaaatcccagcacttagggaggccaaggcaggtggatcacttgaggccaggagttggagaccagcctagctaacatggtgaaacccatctctactaaaaatacaaaaattaaggctgggcacggtggctcacccctgtaatcccagcactttgggaggctgaggtgggtggatcgcttgaggtcaggactttgagaccagcctggacaacatggtgaaaccccatctctactaaaaacacaaaaattagctgggtgtggtggcgcgtgcctgtgatcccagctactgtggaggctgaggcagcagaatcacttgaacccaggaggtggaggttgcagtgagctgagatcacacgactacactccagcccaggcgacagagacagactccatctgaaaacaaaaacaaaaaacaaacaaaaagagagccgacctacttcctcagcggtcacacctttagatcctacctctgcccaggagggattcctagcagtgaaatacatcccggacatggaggacttcaggatgaattttcacgagccccagacacatctgccttgggaacttcttctccataaaaagaactaaaaattatatcccacaaatgtactggtataaggacatatacaatgcagactggattatagtcattcctttccctttgatttttaaagaaacgaaagcatttggccaggcacagtggctcacatctgtaattccagcactttgggaggccgaggcgggtggatcacttgaggtcaggagttcgagacagcctggccaatgtggcaaaaccgcgcctctactaaaaatatgaaaattagccaggcttggcagcgggcacctgtagtcccagatactcgggaggctgaggcaggagaatcgcttgaacccgggaggcagaggttgtagtgagccaagattatgccactgcactccagcctcggtgacggagtgagactccatctcaaaaaaagataataataaaagaaagcaagcatgtgcatgtggctctaaaggatcaccgtcccgagaaaccgtgtctgcttcctctgagggatttgtccattctgaacatgactaggtgagctgagaacattcccagacctggtgcagaacactgaagaagcggtggcctttaaaaaccacctaatacaaaaattagctgggtgtgatggcatgcgcctgtaatcccagctactcgggaggctgagggatgagaatctcttgaatccaggaggcggaggttacagtgagccgagactgcgcaactgcactccagcctggcgacagagcgagactccctctcaaacaaacaaacaaacaaacaaaaaacaaagaaaaaaacacaaaaaaaatctcgataggctggatgtggtgctatcatcccagcgctctgagaggccaaggtgggaggatggcttgagcccaggagtttgagaccagcctgggcaacacactgagaccctctctctacaaataataatttaaaaattagctgggcatgctggcatgcacctgtagtcctagctactcagaaggctgaggatgagacagaaggactccttgagcccaagaggttgacgctgcagtgagctgtgatcgcaccactgcactccagcctgggcgaaagagcaagatcctgcctctaaataaatatataaataaacaaaaacagcttgacactaccagcaagtaaatgaaattggactggactaggctttgactcaaactgcactttcctcaaacatgatagacaggctttaattgggttctggatctccataacaacaaagtagctggaatcccttaaaaaatatatatattttaatatttttcagccaggcacagtggctcatgcctgtaatcccaatactttgggaggcggaggcgggcagatccccgaaggttgggagttcgacaccagcctggccaacacggtgaaacctcttttctactaaaaatacaaaaattagctgggtgtggtggcaggtgcctgtaatcccagctacttgggaggctgaggcaggagaatcacttgaacacgggaggcggaggttgtagtgagccaagattgcaccactgtactgcagcctgtgtgacagagcgagactccatctcaaaaaaacaaataataataatctcagctactcaggaggctgaggcaggagaatcgcttgaacccatgaggtggaggttgcggtgagccgaggttgtgccactgtacttcagcctgggtgacagagcaagattccatctcaaaaaaaaaaaaaaaagttttcgtccgtacaaagtctcactacgctgcccagactgctctcaaactccagagctcaagcgatcccgctgcctcagcctcccaaagtgctgggatcacaggtgtgagccactaagcccagcccaaagtagatggaattcctaaaagagatacctgaatttactcacactctggaataatcaatccaagtgtcttgggatagtaacatttagccattctttttctgacccccaatgggccaaaggaattacacaattctggagaaaagtacagcccaccatccatgtggatgtaaaccatatttcagtagaccagactttttgtctaattttcccagtgaccctcacactatcgcctctttgtgaaggagatcattctaaatttgcttgaattttttcttttcattttcttttcttttctctctctttttttttttttcttttttgagacagggtcttgctctgttgcccaggctggagtgcggtggtgtgattttggctcattgacgcctccatctcctgggttcaaacgatcctcccacctcagcctcctgagtagctgggactacaggtgtgcacccccacacccggctaattattttattttatttttgtagatatggggttctgccatgttgcccaggctggtctcaaatttctggactcaagcaatccacccttctcggcctcgcaaagtgtgggcattacaggtgtgagccaccgtgcccggccaattttctttttcctttctttttttgttttgttttgttttgtttttgagacggagtcttgctctgttgcccaggctggagtgcagtggcacaatctcagctcactgcaacctaaacctaccaggttcaagcgattctcccacctcagcctcctgagtagctgggattacaggcgcctgccagctcgccaggctatttttgcatttttagtagagacggggtttcaccatgttggccagactagtcttgaactcctgacctcaagtgatccatccacctcggcctcccaaagtgctgcgattgccggtgtgagccaccatgcccggccaattttctcttattataagataaatttctctttgtttcacttaagacttatttcacgtgagatctaaagtctcacctgattcaaaaactgaatgcatgcatgaatgaagaagggctgcctgttcactcatcgagtttggcaggtctttctggaatgccacacaaattagttttctctggtgaagccaaacttggaactcaccttagctttcccattggtaattagtgtgtgaccagccccatcatctttctagacttttccctcagacctccaatgtcctgggcactggtgatgtccaattcagactgatgggtggggctgggatgaccttcccaggcaggaaactgctctgccttcaggcaagggcccttctccccatcagactaggcccttctcctccctcaggcctgggcctcctggctcctcatctgaaggcctctgtcccttccagacaggagtgtcccctcccctcggacgggagcctcctccatctcagatgggcatctacgcttctctgacttgatcctcccctcttcagacctgggtcttctctacctcacgctggcagggcatcacctcatcggcatcaccctcagacaggggcctcctctcccaacagacagaggcctcctcctaccctctcagacagcggcatcctcccccctcagacagaggcctcctccctcctcagacaggggactcctccccccgagacagaggcctcctcctaccccctcagacaggggcatcctcccccctcagacagaggcctcctcccccctcagacaggtacctcctctctcctcagacagaggcctcctccctcctcagacggggacctcctcccccctcaaggcctcctccctcctcagacagggacctcctccctcctcagacggaggtttcctccctcctcagacaggggcctcctcccccctgagacagggacctcctgccccctcagacaggggcctcctcccccctcagacagcggcctcctccagccccacccccaccagacagggcatcctccctcctcagacaggagtctcctcccccatcagacggccccctccccctgtccccaccccgtgggacctactcctggccaggcccaggtggctggcccgcgcgtgctgccgccgcagctctgtgatgtagttgcagcagtccaggaagaccttcttgcacgcctcgcccagggagatgaaacgggtccggcgctggcacgagaacctcatggggttctcccgcatgccgtcctcgcagcacttgcgcagctccttggggtacttgccgactgcgggagcacgtgttcccccaggccacaccctcagccgggggccggcagcaggagggacgcgggacggaccccagggaggacttccccgccgccagggcctcccctcctccctctctggctcctgcacggccgggctggggtctcctggggtggggctcgggggcaggagtgggtaggaaaggctcccacctttgtccattcgcttctccgtgagctgcacggaacggcgtcggcgggcggctggctgcgggcactgaagttctgcagggcaggcggaccgagaagaagatggatgaggcacctactaggtgtcctcggttcacccctcacgatcgtgtgaggtgggggtgttcctgctcccatttgatggaagagcaaactgaggctcagaggggagggatttactaggtggtggtggaggcggggcttgaacccaggcccccggtttccagagctctgctcccagcatctgggaggtggaggtgctgtctgtccctgcaccggcccctggtggcgacctcacctgccctctgggcggtctgctggccactgctgctcgtgaaggtcagccctgcgtcggagaagacaccggcgtaatccttcccactgcccggggtgcagccgatgtctgccttctccaccacgtcccagatctgcggggggcataggggtggcgggacgcagggaggccaggctgacaattgggatcccccacatatgcacctgtgtatctcttcccaaatgaccccaccctgtcccactctcatctcccccattcctgcttctgcccttcctttctctttctctttccttccttccttctctctccttccttctctttttctttctctttctcactctctctctttctttctttcgagatggagtcttgctctgtcacccaggctggagtgcagtggtgtgatctccgctcactgtaacctccaactcccaggttcaggcaattttcctgcctcagcctcccgagtatctgggactacaggtgcatgccaccatgcccagctaatttttatatatttagtagagacgggatttcaccatgttggccaggctggtctcgaactcctgacctgaaatgattcgcctgtcttggcctcccaaagtgcttggcctcccaaagggattacaggagtgagccaccatgcccggccttctttttcttttctttctgtcttctttctttcccttccttcctctccctcccttcctccctccattcctcctttcctccttcctttgctccccctttccttccctccttccctccttccttccttccttctttccttccttcattcttcactccctccctcccttcctctttatctcctttctttttctttctctctgtttctctctctcttctttttttttcctcctttctttccattctttttttttttttttaagttgggattttccactgtctcccaggctggagtgcagtggtgcaggcatagctcactgcagcctcaaattcctgggctcaagcaatcctcgcacctctgcctcctgagcagatgggactacaggcatgcgccatcatgcccagctattttaaaattttttctgtagagatggggtcttgccatgttgcccaagctggtctgaactcctggcctcaagtgatcctcccaccttgacctcccaaagtgctgggattccagacgtgagccaccgcacctggcctccattccaaatcttatctccatttcccctctgattccatctgcattcccatcctcactcctgatcccaagccaaccccatctccatcttcgtccctactccggaaaccttccccactgaatgaccctgggtgtgctgccaccagcctctcagggccccagttgaaagtgtccaattctcagccgggcgcagtggctcacgcctgtaatcccaacactttgggaggtcgaggcgggtggatcacaaggccaagagatcgagaccatcctggccaacatggtgaaacccccgtcttcactaaaaatacaaaaattagctgggcgtggtgatgggcacctgtagtcccagctactagggaagctgaggcaggagaatcgcttgaacctgggaggcagaggttgcagtgagccgagattgtgccactgcactccagcctggtgacagagagagactctgtctcaaaaacaaacaaacaaacagaaaaaaaagtccaattctcaggaccatccccaattggaacccatgtccaacctcattcccatcttcagcttcaaccatccctgtgtctggtctgctccgatctctgctttcagcgcatgccccccactgcactgccctctccagtcccacccacctcccccagccccagctccgtgcctccgcctcttctcagcagccttgggtcactggcccttaccttactctgcgtcagtttgttcttcttattcagcacgaacacgcccttgtccacggccaccagtaccacccgggccccgtggtcaccctctatcttcagggtcatctgctgcccaggtacaggctgccggtcttctgactggccgctttttaccaccagctgtggggagggtggagacgccgaaagaagtcagccctgggagagaggagtgcctgggatggagtgggtgctgggctagagtggaaagacagaaaggttggggggagccgtggggctggggagggggagagagagggagagagagagaaagggagagagggagggagagagagggagagagggcgggagagagagagaaagggagagacagggagagagacggagagacagggagagagggagagagacggagagacagagagagggagagtgaggggggagagagggaaagggaaagagggagagaaagggagagggagagagagggaaagagagagggagagagagagggaaagagagaaggagagaaagagggagagagaaggagagagagggagagagagaaagggagagagagagggagagggaaagagagagggagagaaagagaggggagagagagggaaagggaaagagacagggagagagaaaaggagagagagagggagagagaaaaggagagagatggagagaaagagagatcgagagagggagagagagaaggaaagagaaataaagagagagggaaagagagatgtagagagagggaaagagagataaaaagagagacagttgagagacagagagggaggagagaaagggagaggaagagaagagagagaaaggagagagaaaaggagaaagggagagagagagagagaggagacagggagagagagagagagagaggagtagggagagggagagggggcgagcgagcccagggcacacttaccgagcccacgcaggagtccttgacgtccacccacacggagtcggccaccacctccctctggccgctggcaccgatcagcgtgtagtacgccaccaggcggaaggaagggatgaagtcggtggtgatggacaggggcagcaccaccaggtcctggccgggctctcgcacctggcgtcccgccttcaacagcctgcccttgttcatgatctggggggacaggctggcatcaggctggggagggtgagtggcagggaacgcagggagggatccgggatgggggaaggagtcccaggggtgcggaagaaacaaggaggaggcgggggctgaggtttccaggtggccacggaccaggtaggtgtagtagcggatcttggcctcgtgggcgcggtccattcgcaggaggaagttgacgttgagggtctccccgggtctgagctctgtacgtagcactgagagatgcaggtaattgttggagttgcccacggtgctgtagggcagagcctgcatggtcctggtagcctgctctgcctccgagagctcctgcttcttcgtgcgcacctgggtggggaaagagggatgcctgctggtcgccgcccgaggatacccacacccgaatccctgagacctgggaattggtggcctttcttaacaaaaggggctttgcagatgggattaagttagggatctggagatggaatcattatcctggattatgtaggtggagctaatgtaatcataagggtctttattaagcaggggcaggggagaaaggagagacagagacagagagaaagagagacactggaagatgctatgctgctgcctttaaaggtggaggaaggggccatgagccaggcctttagggtgccctggcgacactggaaaaagcaagggagcgaactttcccccagagccaggacttctgacctctcaaactatagacccataaatgtgtgttgctttagatcactaggctgtggccatttctcatggtagccaccggaaattcacgcacatgctgagcacagggaggggtaagtggggtgcgcagcctgggagctgcagagggactgggaggccatctgcaacctccgcagctgtcatgagacttgcttccctcccagtgaggggcaacagagccacgtgcacagaagccaggagaactgagaccacctcacaacaatgggcctgtcccaaacactacacaaccctccttgtgagattcaggctccttcccccatgggagtggaaagactgtgcgtggatggagcgcctctccgtgtaagtggaaggagcagggcatgcaagaggaagattcctgtttcctcaaactgcggacccctccatgcagacggcaggaccccactgtgcaggacagaacccctctaggcaaatgagaatgtctatgcaaatggcaggaccccactgtgcaggacagaacccctctatgcagatgagagtatctctatgcaaatggcaggacccctctgcgcaggagagaacctctctatgcagatgagaatatctgtatgcaaatgacaggaccccactgtgcaaacaccagaacccctgtaccgtcttcccagtgatggggttccgaggctgggcccagacgcaccgtgatgctcaagggcttctggctggggtgtgtgttgatgctgagtttggccacgccatctccctgggttagagactgcacagtgtcctcgccctggactgccacggggactcggtaggctggagagccatcagggttcgtcacgaacacctgtgatgtggggtgcaggtgggggaagttcaggcaggctcagggctgtggccggtgtccccgaagggaggagtgggaccccttcccgccccgggtctcaccatgaggtcaaagggcattcctggtttgaagtacttgggtgtcttggtgaagtggatctggtagggagaggtcacgatggggatcccgctgcgctctgcctgcaccatgtcactgcctgaggggaccagctgtgagtgtaggcttctgggccacccctcaggattagacctcctccctcagaatggaccccaacttcagactagacctcctccctcagagtagagtccactttcatactgggcctgtgccccccatcagactggactccacctttatactggccttgcctcctccatcagactggcacagacttcatactgggcctgtgacccccatcagaccggaccccacctttatactggccctgcctcccccatcagactggacccatctttatactggccctgcctccctcatcagactggacacagacttcatactgggcctgtgcccccatcagcccggaccccacctttatactggccctgcctccccccatcaggctggaatccatcttcatactcggcctcccctctcagactgggcctaccccatcagactgaaccccactttcactctgagcctccctccttagactaggctttctcttctgacctggtctcccctctcagaccggcccacttggtggtcctgagcctggccttcagactgggcctcacctgagtgcaagatgacggtggcagacacgtacaaagacttccccaccaggtcttctgctcgggggttctgcaccccgtccagcagtaccttccggctcagcacaacctcccccgagccatcctcaatctgagaagggagaggagggctcagagaggggagcgggctcagaggtggcggggactggggcagggatcaaagcggcctccgtctatggtaccggaatgcgcttgagggattcaggcagggaaatcctctgttcgccatcctggatcccgaagatgacaaaggcagttccctccactttcttcccgtagaggaacctacgggacagacaaggagggcttcaggtccatccctcctggagaatgggatctcccccagcttctcctgcctgtgctgaagactggagcccccaacccactgctggcctctcacctggccccacctccagcccctcacctggccccacccccagccccccaccttgccccactcccaccccccacatggtcccacctccagcccctcacctggccccacccccagccccccaccttccccactcccagcccccacctgactccaccccccagccccccacctggtcccacccccagcccctcaccttgccccacccccagccccccaccttccccacccccagccccccacctgactccacccccagccccccacctggtcccatctccagccccccacctgactccacccccagtcccccacctggtcttcacctggtccctcacctggctcttacctggccccacccccagtccctcacctggcggtgatggtgacctccaggcccttctcgttatagatgtagtagaatttctctgtaggctccactatgacctcgaaactgggcagcactgggggagagatggcgttggtggggccggcgctgggccaggcgttctgggcactgactccccccagcccctcctcctcttaccgtactccttcacctcaaactcagtggagaagacctgctgtggtgagttttcatagtaggctcggatcttccactggcccatgctgtgaggagggcggatgagtggtctctcaggcctcggagcccccctgctccctctccggggataggggagccctgagccccctcctcaagaacctgacatacttgacgagttccggaatgtcccaagacaagggcaagacgccaagctggttctgagaagacaaggagtcctgcttgaccgggatgccttccgggttctgtgggaggcaggagggaaggatagaggataaagtggctcttcggaggctgggcttagcctctcagctctccccgacctgtgtctggacattctctgtgcacagtgtctactgtggttaagaacagggacccaggtgggcgcagcggctcacgcctgtcatcccagcactctgggaggctgaggcgggcagatcacctgaggtcaggagttcaagaccagcctggccaacgtgatgaaaccctgtctctactaaaaatacaaaaattagccaggcatggtggtaggcacccgtaatcccagctactcaggaggctgaggcgggagaatcgcttgaacccgggaggcggagattgcagagagccaagatcactccactgcactccagcctgggagacagagtgagagtctgtctcgaaaaaaagaacaaggaccggagtcagtcaaccttaggtttcaatctctactgtgccacttacaagctgtgtgaccctgggcaagttacctaacctctctgtgctcaatgtgcaaatcttgaaacaggagattataatggcacctactgtgttggcttgggacatagttcatatgagtaggggctcattttttcagtgtctctctgaatactaataactagtagtgtcatttcatttgctgccaacatttaaacatcatgagacatcattgcaccactgcactccagtctgggtgaaagagcgagaccccatctcaaaaaataatgtattagggcgagcgcaatggctcaagcctgtaatcccagcactttgagaggcagaagtgggaagattgctcaaggtcaagggttcaagaccagcctgggaaatgtagggagactccatctctacaaaaattttttaaaattagctggatgtggtggcgcacgtctgtggtcccagctacccaggaggctgagacaggaggacagcttgggcccaggaggtcaatgctgcagtgagctgtgattgtgccactgcactctagcctgggcaacagaatgagaccctgtctcaaaaataataataatgaatgaatgaatgaataaataagtttaaaagaaattgtacagaggtaacagggatcaggcaagtggcatatctgaaggccgtgagctggctttaggaattaaaacatataaaaatctgttttttttttgttttttttgtttttttttttgagacggagtcttgctctgtcgcccaggctggagtgtaatggcgagatctcggctcactgcaggctccgcctcccgggttcacaccattctcctgcctcagcctctcgagtagctgggactacaggtgcccgccaccacgcccagctaattttttttttgtacttttaataaagacggggtttcaccgtgttagccaggatggtctcgatctcctgacctcgtgatctgcccgcctccacctcccaaagtgctgggattataggagtgagccactgcacctggccaaaaatctgtttttctagcttctgttggaaacaaggaaatttctgtggatagtgtactctggttagcaggagacatctaattggagctgggcaactgttgtgcctttacaagagatgtgtggtctctgttccccacagaccacatcaatccctaaatctagataatttttacattttttttgtagagatgtagtctccctagctttcccaggctggtcttgaactcttggcctcgagcagtcttcccacctctgcctcccgaaatgttggaattacaggcttgagccattgcatttgccccaattattttttgagacagggtctcactctgccacccaggctggagtgcagtggtgcgatcacggctcactgcagcctggaattcctgggctcaagtgatcctcctgcctcagcctcctggggtagctgcaaccacaagcaagcaccaccacacacagctgtttttttgtttgtttttaacttttcttttttgtagagacagggtctggctgtgttgcccaggctggtcttggactcttgggctcaagcgatcctcccgccttggcctcccaaacagctgggattacaagtgtgagccactgcacctagccttgtatgatttcaacacatcctcatgataattctatgagaacaccctccttccccttctctcctcccatccttctcgcttcttccagtaagttttttattaaacccaactatataccagcattgtgctgagttcaggtgacaaaaccctcaacaaacataacaattccttcctggagggatttaggttcaatagagggcgaggcgatgggagaagcaattatcaaatgaataaatctcatttgcaggacatggcaggaaggaggagtgtgtgtagcggggaggggggacgctcagggtgggtatttgcgactttataggttactcagagagacctcattgtaaaattgagacattggtgacatttgagcaaagacttaaaggaggagagagaacaagctgtgtggatatttggaagaagagggttttcttgagaagagggcacagcccgtgccaaggcgccaaggcaggactgcacctgggtgttggaggaacagggaggatggcccgtgtggctccagaagagtgaacgagggggagagagggaggaggggagggcagggaagggacagggcaaggtgtgcagggccttgtggactgcagggaggacttgggctttgacgcataggaaggtgggagccatggagggctgtaggcagagcagggatgggccctgactcaggtgctcacaggcgtcctctggctgccgtcggtagaatagatgacatacaattatccgtcatgatcccgatattcagataaggtaactgaggctcagggaggtgaagtgatcaggggtttaactgaaagcagaatccacggacacctgcactgctccctggggtctccctggatctccaccttgtctctcagcctgtgtgtgtgtgtgtgtgtgtgtgcgcgccatatggtgtattgtgtggttgtgtgttgggttgtgtgttgtgtgtgctatgtttgtgtgcactgtgttgtgtggtcgtgtatgttgtgtggttgtgtgttgtgtggttgtgtatgttgtgtgtgtgttgtgttttgtgtgtgttgtgtgtgttgtgtgttgtgtgtgtttgtgtgtgttgtgtgatagtgttgtgtggttgtgtgttgtgtgtggtgtggttatgtatgttgtgttgtgttgtgtgtgttttgtgtgtattgcgtggttgtgtatgttgtgtattgtgttgtgtgtgttgtgtgttgtgtgtgtggtcatgcacgttgtgctgtgtgtattgtgttgtgtgttgtgttgtgtgtgttgtgtggtcgtgtatgttgtgtgtttgtgtgtgttgcattgtgtgtgtgcattgtgtgtgcacatgtgtctgcatatctctttgcctctgtgtgtgtattgtgtgctgtgtgtgtgcatgttgtgtgctgtatgtgtgtgtgttgtgtgggtgtgtgtctgcatatctctttgcctctgtgtctctgccactgcaccccttccggtgtgtctttctctgtctctctcgatctctttgcctctcctaagcctgtgcccctgcttcccctggggccccctctggctggcacctcaatgttgaccatgaccgtccggcccacgggtagcagcttgtggttgacggtgaagatccgatagagaactggggagagacaaagaggcctcgtgagaccctagcccgcccacgccggtgccccgccctctccagccgcccccagcctcacctgtggagccaggggtgtagatggtcttgtctgtctggatgaagaggtacccgctctgcaggctgaccagcaccaccttctccaccacttgggtcccgaaggtggcctgcacggtcacgaacttgttgcgccccttttctgacttgaactccctgttggctgggatctaggcgtgggcagggcattgtcaggggtctgttccaaggccccatgcccacggtccagcttccggatcttgggctgggtccctccttgcctgcccattattcttggtcttccgaggtggccgttttggggagggaggggcatgtgaaggaggtgcgaggggagaggggggaccagggagggaactcaaaaagaagagctcacaaggaggagagagcttataggaggaggggctcagaaggggcggggactcagaaagggaaggggctgacatgggaggggctcagaaagggggagggactcaggtgagggaacttagaaagtgatggagactaagaggggaggagttcagaagaggagacttcgagggggaggggcttggaaaaggaattcagtgggagggacttagagggggaggagactcagaaggggtggagtctcagagaaggggaggaacctcagaaggggtggggtctcagggaagggagggactcagaaggggaggagtctcagaaggggtggggtctcagggaaggtcagggcttagaaggggaggagattcagaaggggtgggggggggtctcagaaaagggaggggcttataaggggaggagactcagaaggggtggagtctcagagaagggaggggcttagaaggagaggcgactccgaaggggtggagtctcagggaagggcagggcttagaaagggagaagacagaaggggaggggctcaggaggagggggggagtgggcgtggctgtgggtgtcagccgggtcctgcgccagtctgcactcaccgtgaaggtgacgttgcccatgtggttggtggcaggggtcagcacagtcttctcactggacagcactagttttttgcctgggaagtcgtggacagtaacagtgactggaacatccccttgcgcgtcgtgggcctccagcaccatggtctcctcgctctccagccgcaagatgttgggggtgatgatagagtacctgtcggagtggggcacgggagtgggcttgtcattccacggatgtgagacgccagtcctcactggagtcagcgcctggcaggctgtgtgccccagcctctggtcctggagaggatccagtgactgccggcgcacttgccaatgccattatcttctctgggcactgccaccgtctcaaccacatgggcaggacagcagccaccatgactcccactctcagccagctgggcctggcctttgaaagcctgggcaacgagggggccacacatcccaccaaaccctgaaccttccaaccagcgtcagcaactcctccaagtctctggacttccagacccacaatcgcctaaacccacacatgccccaaaccctaaacctctacctctctaaacactccaaatatgtaaacactcaaactcccggacaccctcaactctacctacccaaacccacatacgccaaaacctctaaacctcaaatcttagagcaccccaaacccagcctaaacctccaacaccccagtcctaataaatacaatcaattccaaatgccccaactatacatgaacccgaagtagccaatctttaaacccacactgaaaattgcaagtccccaagctgcaaactcccaaatcttgtaaagtccaaacctccgagtctccaaacacccccaaccgcaccatcaatgaacaccacatacaccctaaaccaacagatgacctcaattctagaaacatcccaaactccaattccaccatacctggattccacaaacacccaacccataaacacccaaactctcaggcagcccaaatgtatataaactccaattccacgatacctggattccacaaacacccaaccacaaacacccaaactcacaggcagcccaaatgtatataaactccaattccatgatacctggattccacaaacacccaaccacaaacacccaaactcacaggcagcccaaatatatataatcattcccaacctgctaacccctgaatccacaaacacccaaatgcaccctgaattctacagggacctggacccccaaatgtctgcttccaccccagaaccagccctgtttgtgggtagagtcataaccactcacatgggactccccagagccagggggaggtgggttagtagcaggagcagcaggctgggacctgaggtgggtcccatggtgctgggacagtgcagggtcagagggacagagggacagagggagaggatggggaggagtgagcagcgcctgctggagctggctttttatctggctcctgcctttcccccactcagcccccccttctccccatggcctctccccttttggggctgccccagatttctcaataccatttcctaagcttttcagtccctggggccaacatgtccatggggtgagtaacctgagggcatgttccccagcagcatgaatgcagctgcaccctgccctggactctcccagggtcagggccacctggtgaacacagacctttctctgttggacccactttgtagtggaagaacactaaggtctggagaaccccccaccgcagatgtcttggacctcatccccagttcacttttggccatgcgtttatcagtcgaacacttcctaggaatctctctgtaggctgggagtcagagccccacttccagaggcttccatgctgagggaggggaagtagaatgggggagggacagagcccagcacagaaactcccagtttcatgaaatgttttctagctcatgtgcagggcagggaaaaaaaagaagaagaagaaatgttttccccagtgaaatagaactctgcttcttggagggtcagggaaaacttcctgtaggaggggacatttcagatgggctttgaggtatgtgcaggagttcactatccaagtgagtttattttccaaggaggctcccctcacttacccttgtcaggatgcctgagtgactttggtggtgaaaaaagtcatcactgaggaaagtcctcatttctagagcttttgtacctgtctaatgtcaatatcctcttaggatattaaattgtattgtttgtgtgtgtgtgtgtgtctgtgtgtgtgtctgtgtgtataatatattcatattgatcaacatctaaaaggtacaaatgtgtatagcagtaaaggtggtcttcctcccatccctgttgacagcatattctttttgtgttttcctttaaaaaaatttttttttcattctgtcactcaggctaaattgcagtggtgcaatcacagctcactgcagcctcaacctcctggggtcaagtgatcatcctggctcaaccacccaagtagccgggactacgggtggccgccaccatgcccggataatttttttatttttgtggagatgggggtcccacgatgttgcccagtccagtcttgaactcctgggctcaagtgatcctcccgcagcagcctcacaaagtgctggtgtgaactactgtgccctgtggacagcacatagcacatactattcttcctggtctcttcagttaaatcttgggtttcgttttgtttcgttttttcatgaacaatatacctcagaggctatttcacctcagtgagcaaagaactgcctcattcttacaggttacaggcctcttgttatattgtgagaaagtaaccagcctcctactttttgggggatattttgtttgtttgagtgttttttttttagagtcttgccctgtcacccaggctggagggcagtggcgctatctcagctcactgcaccctccacctcctgggttcaaacaattctcctgcctcagcctccggaatggctgaaattataggtgagcaccaccacgtctggcaatttttgtatttttagtggacaaggggtttcaccatgttggccaggctggtcttgaactcctgacttcaagtgacccacctaccttggcctcccaaagtgttggaattacaggcgtgagccgctgtgtccagccaccagcctcttcttgatggagagactgacatctgtggcttcacaccaggctctctgcagtgaataagcttgaacctgcgttattttctagctctgaaactagctgtgatctttgggtaagctactgattaccgccctgagcctcagtttgttcatggaaaaggaaacccttaccacctgcttcatagagttgtcgttgcaatgaaaggaaatatgttgggtcaatctctgaatgcactggtaatcttgctagatattgccaaattcccctgcacagaagttgtattgatttacacacttatgagccctgcatgaaatgaattgtcagtttcttccacagcctcatcacaagggcatgttgatgaacttgaagatttttgccagccttatgggtgaaaactggtaccctggtgtcattttttttgttttgttttgtttttttaaatggagtcttgtgctgtcacccagggtggagtgcagtggcgccatctcagctcactgcaacctctgcctcctgggttcaagtgattctcctgcctcagcctcccaaagagctgggatcacaggcatgcgccactacacctggctaattttttttttcttttattttttattttttgtatttttagtagagaaagggtttcgccatgttggccaggctggtctcaaactcctgacctcaggtgatccgcccacctcggcctcccagagtgctgggattatagaagtgagccaccacaccccggcagccggtgtcattttaactggcattcctctgacgttctgcagcattgctgcccaggcatacgaggtggatggtgagggcaggagaagggtctgtgggtggggcccccttatccctggagaggcggtttctgaaaccccactgaaggggttaatggggagttttctctgatttcctgtaaaccacattcttttccgtgccaggggtagggggaggcgtggagcatgagaacaaacctggcgtctgtctgcactgattgcgacacactctttggaagaggaggaggaggaggagagagaatgaaaatacctgcttgctctccagaattggggttcagcttttgaaactgcatccccttgccaggcgcagtggctcacgtctgtaatcccagcactttgggaggccgaggcaggcagatcacttgaggccaggagttggagaccagcctggccaacatggtgaaaccccgtctttactgaaagtacaaaaattagccaggcgtggtggtgggtgcctgtaatcccagctactcaggaggctgaggcaggagaatcgcttgaagccgggaggcagaggttgcagtgagctgagattgcaccactgcactccagcctgggtgacagagagagaccctgttgccaaaaaaaaaaaaaaaaattaaaaaaaggaaagaaactggatctcccaattgccccattccatcttctatcccccactttctcctcaagccaccccatttcctggtttcattctagactcaagcattcggcactgtggtttgacaaccttgagaaggaattcctgtctggcctctgtctagcggcaagcctgggttcctcttttctctgagcctcggttaatccaactaaacaatgcgactgaagatagttctggttgttgtgacaattaaagaaaccaggatgcctagaagccaccaggctcagaggggccaggtgtggtggctcacgcctgtcatcccagcactttgggaggctgaggctgggggatcgctggaggtcgggggttcgagaccagcctggctaacatggtgaaaccctgtttctactaaaaaatacaaaaattagctggctaggcatggtggctcacacctgtcatcccagcactttggaaggccgagatgggtggatcacctgaggtcaggagttcaagaccagcctggccaacatggtgaaaccccatctctactaaaaatacaaaaattaactaggattggtggcgggcacctgtaatcccagctactggggaggccgaggcaggagaattacttgaacctgggaggcggaggttgcagtgagccaagatcgtgccactgcactctagcctgggcgacaagagcgagactctgtctcaaaacaaaacaaaacaaacaacaacaacaaagaattagctgagcatggtggcaggtgcctataatcccagctactcgggaggctgaagcaggagaatcacttgaacctggaaagggtctggccctaccctgacctccaagaagtgaccagaggggaggggcaggatgagaagtgagggggttggaggctggagcagatggtagcctactgggagggaaggagggagggagatgagaccgggaattcttcagaacctcgtgacttttttctgggagatgtgcattggtgtccagaggtttgggagggggatagtgcacaaggatgagccagcaggggagggagagaaggaggtctgggtgtgtgttggggtactttccattttgaggcccacccagcccagcattcccggaatcaaggagggagagtgtggccaaccgggctgaccattcgtgggttatctggaagctacatatactgaaaaagtagttgttatttatctgaaattcaaatgtaactgagcgtcctgtattctgtttggcaatcctagctggggtgcaaggggaaaatgagaaggggccagggtgcggtggctcgtgcttgtaatcccagcactttcgggaggccgaggtgagagcattgtttgagtccaggagttcgagaccagcctgagaaatacagtgagacttcgtctctacaattgaaaaaaaaaaaaaaattagcagggcatggtggcgtgcctgcagtcccagctcctcgggaggctgaggcaggaggagttagaggctgcactgagctatgactgcaccactgccccccagcctgaatgacagagcaagacaggaaaaagaaagaaaataagaggaaggaagtgggaatgatttctgggtgggggacccagatgcccccggctcacacctgcctgagttcactcactgtcccctatatcccatccctccccttccccaacaaaggggcagccaggcctgggagcagctgggaaacccctatcccatcgtctaattccaggctgaggtggctgctttcctagaatttttctccagaacccacagcaaggccatccccttcttccaccctattactgattaattcaagttaaccttgacctgactgactgaatcaatctatctgcctggcaacaatggctctttccctcctctccctctggtacactcagcagaaacaagctggggccctatagactcccgccctgggaaaatggagagcagtgggttttgattccagctctgcagggcccctgggaaggtccaacccctcctcccagcctcggttcctaatctatcaactggagatgcacagcctacagcctcctttctagtcttggagtggaagtcccaagtggcacccaggaaacaatccttaacccagcgccctgcgcatactgagcgctcagtacacttgaactgtactttttgtttttgttttttgagacagagtctcgctgttgtcggcctgggctggagtgcaatggcacgatcttggctcactgcaacctccgctgcccggttccagcaattctcctgcctcagcctcccaagtagctgagattacaggcgcccgccaccgcacctggctaattcttatatttttagtagagacagggtttcaccatgttggccaggctgatctcgaactcctgatgaactgtatttttatttttgcaaatacccgtgtcttctaccccagccttgcttgggtgacggccccaccaggcttccaggctggactccttccttcctctcattcccagaattcacctgctggccaagcccctgcctggaatctcccagcttatcctccctctccacacctgtgatctctgccctcacctctgccccagcctcctccttaccagcccatttactctgcagcagctggggacgctttacttttatttatttaatttatttttctaaattttatttatttatttatttgtgagacggagtcttgctctgtcgcccaggctggagtgcaatggtgcgatcttggctcactgcaaactccgcctcctgagttcaaacaattctcctgcctcagcctcccaagtagctgggatgacaggcaccagccaccacgcccggctaattttttgtatttttagtagagacggggtttcaccatgttggccaggctggtctcgaactcctgacctcaaatgatctgcccatctgggccttccaaagtgctgggattacaggcgtgagccaccgcgcccagccttattttactcttttaaaagcagggtatggccctgtcgcccaggctggagtgcagtggtgccatcatagcccactctggcctcaaactactgggctcaagcaatcctcccacctcagcctcctgagtagctgggactacaaggtgcatgtcaccatgcctggcttggggactccttcctttctaaaatccacctttgggccaggcgtggtggctcatgcctataatcccagcactttgggaggccgagatgggtggatcacttgtggccaggattttgagaccagcctggccaacagggtgaaaccccgtctctactaaaaatacaaaattagccgggcgtggtggcacatgcctgtaatcccagctactcgggaggctgaggtgggagaatcacttgaacccaggaggtggaggttgcagtgagccgagatcgcactattgcacttcagcctgggcgacagggcgagactgtctcagacaacaacaacaacaacaaataccctacctttgtattcctttgaccgatcatgagcgcactgacgctcacaaacgcctatgagatgcgggtggcagcaacttatctatttcacgtattttaacccttgtttatgccacatgccataggttctatcattgccccattttacagatgaagaaacagaggctttggctgcttgcccgagatcctgtggctggtaagtgccggaatctgaactcagagagctgggccctatagagtacgtgcccttaaactgcatgagttcttaactgctgcagcaaaagatgactgcaaactcggtgcgttaaaacaacatgtttcttatcttacagttctggaggtcagacgtctaaaatcaaggtgtcaacaggactgtgttcccttctggaggaaacagatgaacccatttcctcgcctttttcagtgtctaggagccgcctgcattccttggctcgtggcccctttcttggaatcactgcagtctctgcctttgtcactgagtctccttaactctgaccctcccacctccctcttataaagacccctgtgacgatattgggcatatccagataatccaagataatctcccccattttaagagccttaatcccatgcacaaagtcccttttgccgtgtgacagaacatatcatatccacaggtcttgaggattcagacgtgcacaccttttttttttttttttttttttgagacaggtctctcgctctgtcaccaaggctggagtacagtggtgcaatctcagcttactacaacctccacctcctgggttcaagtgattctcctgcctcagcctcccgagtagctggaattacaggtgcccaccaccatgcccagctaattttttatttttagtagagatggggtttcgccatgttggccaggctggtcttgaactcctgacaagtgatccgtctgcctcggtctcccaaagtgctgggatgacaggtgtgagccaccacacaggctggacgtgcccatctttgaggggaccatgactcagccgactgcagcatgcacatgcagtctctctggccatgctcctccctgctttaaattcctccatggctcctgtggacccctggatgaagccccatgtgcctgcctgtctttaggcctctgccagcttctctcgccctcctcctgccccctccagcctcgcgggccatcccagccttccccgccgtgttcatgtaacttccccagtctgcaatgcctcccacttccttctttgtctgaccaggctatttattcatctgggccccagctatatttgtttctgcttacaggaagccttcaccccagccctgttccctgccgctgtcccatgcttgtgtctccagcgaggaaggcttctccgagctccaaaaggcattctggatgctctagttgaagggcaggtgggtggggggtggagacccatcttgggaacctgcccttaagtgtgcacacaagcagatctccaattcctcagtcgcccctcaagattcagggctggttccctagaaatcaggtcgaggctgtgcagctgggtgctgtgcctgctattgtatgtgatactcaacaaacttaggaggccccatgttatatgcaaggaaacagagagagtaagccagtgatccagggtcacacagcaaatggcaacaggctgagagatttggtcccagggagtctagctatggagcagcaatgcatatagtcagtgtctggctttgagccgggagtctcccactcactcatgagctgtgtgacctcaaggaggtttcttaccctctctgtgcctcacaggctttttaacaaattaaaatccacagaagccttaatagacagcgtggcgtagcaatcactctgtgttacctcgtattattttttcttttcttgagatggggtctcgcttgttgccctggctggtctttaactcctgggcttgagtgatactcctgcactgacctccgagtagctggaactactacaggcacttgtcactgtgcccggttagcttctattattattatttgttttgagatggagtcttgctctgttgcccaggctggaatgcaatggtgcaatctctgctcactgcaacctctgcctccctggctcaagcgattctcccatttcagcctcctgagtagctgccattacaggcacctgccaccacacccggcaaatttttgtatttttagtagagacggggtttcaccatgttgaccaggctggtctcgacctcctgacctcaaacgatccgtccgccttggccccccaaagtgctgggattacaggcgtgagccaccacgcccagcctattctttcttttcctctgtagcctgagccacttgggggccttcaaatccccgttctcccctcgcccccagctttcatgcccgcggttccctcatctgggcatgagctcttccgccatgtttctactgacctttcctgacccccaaggccgggtcagagccctgtgcagttcccgtcacggcgctgatggcccagtgatggtactgccaggtgacatgtccctctgcctgacccccactctgggcactgggagcccctttagggctgggaccaggtgggtctttgtgaccgctccgtcccagcgcctggctttgggccctgcatgcagcggttactgaatgaatatttattgaatatacaaagacacggaccctgtgcccgcgcccccgccacacacagcgaaaacaggtttctacattgtaaacacaacctccgtgtagaccccaacccccaaaaaggcaagacaacggcgtagccaaacagattggtcattattgtacacatagctggaagggaggggtggtcccggggtaaggacagggctgcccaatatttggggggaggaagggactcttcttccaaatgggcttgtccgggaaccggggtcccggggagctgggcgcctggtccacatggaccccctccacctccccacatacgctgtggaagaagggcaggagtgagaaatgctgggggaggacgaccctttggtctgagatgtggaggtgatcataacagttcccgcccgctggctgttttgttgactttggagaggccttcccggaacccagagtccgtcattctgggggcagacagcgaggaggcgtctagcgttgcagggcagcaggccccacccactctacccggaaccactcaggccccgccccactccccccaaccacagcagccctggccttgcccactctaccccagactcacccaggctgcacccacctcgctcccacagcagcgcaggccctacccttctactccaaccacctaggccccgcccccagcagccctggccccacccactctacccgtaaccactcaggccccgcccaccttactgccatagcagcccaggccccacccgttctacccgaactacctaggccccgcccacccccgcccccagagcggccctgggtgtctccctagcggccctaaccccacccctagctcagcctggccttaggtactccacagctgtccggtccccacctgcacagctgccctggctgccccccatctcccctccatcccttctcaacagcaggctctgccctaacactgcccccagggctgctacagtccctcccccctgcccaccctgcccgtagagctgcccaccccctactccacccccagagccgccggccctgcccatggtgcccagctcacacttgctccatctgaacatcctcctcgtcctcctggggcagctgcaggtacgggttgtttcctgtgggctggaacttgtagcccgtgagcacgaagaaggccagggtggagccctccaccaagagctgggggacggggcggagtgggggcgtcaggcgcacccccacccccaccgtggccgccctcccgtcccacctgggcctcgggctcacctggtacagccactgccactgaaagggcacagccacctgcagcaggatggcgatgatgcgggtgaagtagacgtagcagatgacctgcaggggcgcgagcaggcgtggggccaggactgtaggggcacgggcaggcatggggctagactgcaggactgcgggctggggagcctggatgggggcctcgggatggggcagcagctgaggggctggggtgggcgtgcagcaggccggtaatccccccaaacccgctgtgagtgaggcgggctcctaccatgacatagtaatgccggaacagcttcagcttggccaggttcactgccactgagggtgggcacagagagggcggtcaggggagactgagggtgggagggaggggagggggctgggggctgggagaggtgacaaacagaacatctgagggagtgtccaggagcagcaagtctcgaggggacattaggtggggcagaaaggcggaagggggagatcagagaggagggaagggccacccaacagggcagagaggccagataaaggcattcgggggaaagagaggccagactggggcatccagggaggcagaggcctgggggctgggcagagaggccaggaggggcatccaaggggcagaaagaagggcccggaggaggaatggggccatgagcagagggcctgcaggcgcagggcctcacccttcccgtctgtgccagacgcatcctggagatgccggatggacctgggacaagtggaggacacagggtacggtcagcgcggacatcgcccatgtgcacagggcagagcctcagcccgggggcagggtcctcaccagactacggggaacaggatggcaccacagcagatgaggtccaccaggaacaaaatctccttccacagcacgtagtcgctggcgccttcctcgcgggactcgatgatgatgtaggccacgttggccaggacctgcgcaggcggcgggggtgggtgggcactgcctggcacgctcccctttgcccccactgccctgtgcagccctccccgccctgctccggaggctgctccatccgcacctgcatggggatcacgatcccaaagaccttcttctccttatccgacaggacgtacttgatgaaggcccagcctgagccaatcagggcgatggtgatgaagaggagggcgcccttcagcctgaaggagcaggggagggcgtgatgatgaggtggggggccaaccctcccctgcctgcctccccccagctgcccagcagagtgggggacactcacaggtgtgcgatgtagtacatgacggcaaggccttcgatggggtggccctggctgttgatgaagtagtagttgatctgggggtggatggacagacggacagtgaggcgcacagaggggtgggaggctgatggtggtggtgggggattaggaacacggaccgtcaccatcagatgggtggtcagaaagttgaataatgaggacggtgggtgggactcaaaactggtaatcggggctgaaaaaatggagggaacagtcacagctgaaggggtgaatagttggacaatcagagacggacagtcacagctgaaccaagggacagtggtggacagagctgccccgcaggactggtggacagaggggatgggtgactggccacactggtaaaatgggtggacacgtggatagctggcggatggccctcccacaggcccagggtctgcagagatttgggggatggcccgggtgggcctttcagcccaccccccgctgctccccggtccaaggctctcacgctgtggaagaggagagagatgctcttggtgaaggccaaggccgccatgagccagtggatcttgaagacgctgtacctggtgggagggtcagggagagatgggggtgcggggcatcagcagagcatagggatgggggtctggtgaagggacgtgggggaccctcaggggcaggggcattacgtgttcctgcagaggatggacacccagaagatgccagcggccaggaagcaggcggacatgaccatgtagagcttgaaaaggggcatctccgctgccgacaggaagccatcggggttcttctcccggatcatcacctgcggagggggcagtggtgggcggcggcaggggcacagcccgaccgctggcctgggagagcagcgagtgggggtctccagctctctcactttctactgggccactcatccactctgagcctcagttggccccgtctctcaaatgggtataacagctcctacttcgcacccgggagggctgggaaaagctaagcggggtgaggcactctgggcccgcagtggcctgcagggggcgctccctggccctgctgccctccactccgctcaccgtgatgtcgaatggatgctcctttcctggcactgaattgttgcagttgtggaagttcaggctgtactggccttcttccgcctgagagccgatcaccacgtggaactgggcgggcggggagagaggagggctcagcctgggggacccgtggtctggggcgacaatcagcttgggggtcccatggtctggggcgatggtagggctgcaggagggctcagcttgggggtcccgtgctctggggtgacggaagggccgcaggcgctgcaaacactcacactgaagttgtaggagttgttgaggtggctcaggcccaacaccaggtccttgtccttcccactaggaccctgaagggacagagcccctccatcagctggttctgggtccccgcagggccctggggtgtgcatcttccctcctgccccgcctccccgaaacctgaatcactgcgggtgttgacttgggcttgctggctgcagaggtccctcctgtaagagaccgggcagtgattttaagagatggatggatggatagaggggcagtgggaaaacggcatggggagtgcaaagggcagacctgcccatccacccccgtctgcacagccagcctgactcaccgccatccaccttgcgggggactgtggcctgtggcttcgggagccctggtttggagggtgcttccgggaggagcccgggaaagataaacaacgtcttctgctctccatacttccgcacctggaccctggggtgagggtggggtggggcatgaggctggggggctgaacttggctcaggcaccggcaaaggactcagtggccccttggaccctctgcgtgtcctccctgaggggcggggtccagtcgagtcagttatcactgagtttcagcctttggttcccaccggtcaaggaggctgccgccttcctgtgctgcctgcatccgcagttattcgtcatttcccatgacatcaatctactctttttctcttttctttagagacagggtcttgctctgtcgcccaagctggagcgctgtagtgcaatcacagctcactgcagcctcaaattcctgggatcaggcaatcctcccacctcagccacaggagcagatggaaccacaggcgcacaccatcatgcttggctaatttttaaattttctagagacaggggtctccctacgttgcccaggctggtcttgaactcctggcttcaagtgatcctcctggctcagccagtctcccaaagcactggaattaatggcatgagccaccatggccagccctacattattattattattattattattattattattattattattattattttgagacaggctcttgatctgtcgtccaggctggagtgcagcagtgcaaacttggttcactgcaacctccacctccccagctcaggagatcctctcacctcagcttccagagtagctgggactacaggcgtgcaccaccatgcctggctaattcctgtacattttttggttttttagtaaagacaaggttttgccatgttgcccaggctggtctacaattcctgggcccaagcaatccttttgcctcggcctcccaaatactgggattacaggcgtaagccactgcctggccctaagtatattatttaaaaagaaaacattttatctacagaaaagcaacatggttttgtcagaccctggccccagaatcccagttcctgggactcagttttcttgtctgaagagcggagatgatcacaggataaggaatgggtgagttagtgtattaaagctccgggacaccggaagcactcaacatgtgcgaacaattgttattcattctcacaacaaccctctgtatccgggtcttctgccctgagacaccaacacccgcggagtccctctctccttccttccaacaatcagaagacttgaaggcaaaactaaaaagtaagtggctttctctctctgcttctcatcccacctgatcagcccaggtgcgtgtgggcatcacaccagggaaacgcagacgaaggatctgagcgagcccccggtccccaactcactgcagatccttggtgttgatgaggaacaggaccaggaaactgctactgtttttctggagagggcagtcctggaaatcccgggtctggggggtgggcaggagggagtgagtcttggttactcctctcctggtccagctccaccctgtctccctccctgtccacccacgggatcttcctgctcctgcctctgacaaagaacaggggcccttgggttacagatgcagaggacagaccctaccccctccctccagccccttctcccgtcttccccatgccctccactcactgaataggagcgaactctgccagaccgaacccggctgagactgaaccccacctggtgggtggaaaaaaaaaggggagggtgtgagggacagtagagacctcccagctatccctttcagtagcaatagaaacctaacctcacatttactgaacacctaacatgtgctagatcccacacgctctttttcttttttagagttggggtggtgggtggacctcattctgtttctcaagctggaatacagtggcaggatcatagctcactacagcctcgaactcccaggttcaaacgatcctctcacctcggcctcccgactggctgggactacaggcacacctcaccacgcccggctaattttaaaaactttttgtagagacggggttctcactatgttgcccaggctggtcttgaactcctggcctcaggcaatcctcccaccttggcctcccaaagtgctaggactacaaagcctgagccaccgcgccccgcctgtcccccaagtcttaagaaaagtgcctagcacatcctgtgtaagacatcattactcccaggtacagatgacgaaacaggctcagagagatgacgggacttgtacaagatcacatgggtagcggcagagctgggaacccagaaccgggggattgcaccgtgctctcctccagcaaactcctcaaggtccctcaccagcagggacttctcttctgcctcccggaggcccagccgcaggacgctcaactccacctccagagagccattggtgtagaaaccgaagctgttcagctggatgtccgctcgcttctccccctgccggagaccaaggaggcagaggcagttcagacctctttccgcctgcccagccccaggggtctggcacgaggacctccagaagggcctcctggtacccctctatttaggacaggcccagaggatgacaagagaaagttgagagggacttcctccctgcaggggaagggtggtcctgcattctccgacctctgttctgagaacccaggaacagagatcctgcggcacctggaagtctccccactggggtgagcaccgcccggagaacagttattcacctcggcgtgcctgaccttcaccttcccgaagaacttttacattccagttgagctcccagcaatatttcaacagaaccccccaaatcccattaagtgcccagaggaccccactctatagccccccaggaccccgctgtgcggctccagggtctctagcgccccaaaagtgattccaagaatttaaaggactaagacccagttggggggaaggggggtgtagtccccaagagatggagcctcgcccccgaagggagggggccgaccccagcgaggcggacccggcaactccatccggaggaccgaaggggatcccgggacgagaccactccgggcccggaaacggggggcgccggaccactccaccgcctcggggacgggggagggcggacgagaccactccaagccagggggcttctccgagacaaagttgcgccaccgaccccagaccctcgcgcggcgggcctcaccgtcagcgccagctggtggatgcgcccggagcagccacccagcagcagcaccagaagtagccgctgcccccactccgcggggctcccgcggccgagccccctcctctcgctcactgccatctctggagccacctcctccccgactccgcctctggcgcccaagcccgcccaccgatgagccaatcgccgcacggcggggcccggcctttcggagtttccagtccgccaaccaatcagcaattgcctctccgcaagcccgcctgcttgcgtcaccgacggacagcaccggttccgaatgggagagccgataacgcttaacccccagctcactctcaccaatcgctataaagattgtccggatgtgatttaatgagcagtttatctaaccaattgtcatggatctgatatccggcccttaaagcggaatttctccacccactcttaactgtccgggactacattacccagaatgcagcgggagcagacaagggccacaaagcattaaataaactacctttcccagtatccccaaggacggacttcctcttcttgagccagggatgtggctcccagccagagctgaggcttttggtaaacacacgcatctgttcaggcctgacctgttttcctaatcttcctggtccacagagaggcctaaagctggcctcaggttaaagtttgaccctaggatgacctatgaccccaggctgagaccccagccttaggctaagccttttattccagagtgaggcaattggagccccacccccagattccaggctagaccggactccgggctgaactctgaccccaggtgaactccctctctgcaagttgagtcctaacttcagcctgaaactctgacaccccctcgtcccccacaccacacactgaggcttaatctctggtttaggccaccgatctggactagccctgactccagattggacctgaccccttaccgggttgctaatccttctggttaagcctctggcctctatcccctatccccacggtggtgctgacctggactgaaccccaattccagtttgagtctctgagcagaggtgaactcagaactttgctaggctgagcccccatttgagactagccacagaactcactgggttcaattgcccaactgcaatcagacattttctagctcagaagccaccagcaggtggggccaggtctcagcagagacatcagtcccagtgtgggctcccaaggctctcctcctgggctcagctgtatctctctgttctgggagcctgggtgctctgtgtaaggggaacgtatacccaagggcccccctgcaagacgcccagccttgtctgaggctgcagagaaagcgccaaagcccggagagaatgggagtgggaatccccagtgcctcctctcctctttcattccagcacctcaaagggatttacaaggtgtgaacagacttttatgggagaggtgacagacttcccttctccagggcccagatggcccagatgtctgggggaggggcggagtcggaatctcaggggcagtactgagaatgaaaccaggttaaactggaaaatgggcagatgcaggcgcgaactggaaggcagctggggaaaggcctgggcctggcgccccaaggacggcctgtcttcagtttcccagcggagactctgggggagggaaggcaggatgcggtgcgggagttaatggacctggccttggcgaaggcgcgtcctgggttggatcgaaaccctctcatccgccctgtggccggagggaccagaccattagtgggacgaacctagacgcctggagccgggccggctcgcaagaacggggtgacctcaggttgcccctgcaatggggttgaggaaggacttcttgagtttggggttttagtgtcttggccctttaaggaataattgcggggaaaggggaaaaggagatgggaagaaccgtttggagcggggaaggaagatgagaggacgagagggaccccggggatttggaaaaaatgggtgggggttctttaaggggtcggtccagcggcgtcgagtggcaacgttgctttaaaagggggcggagcgtccgttgggccccgcccccgaatcgcagtgcttgggctccgcgcgggtgggggcgtggcagagcgtgcaggggggcggggaagagtctggggtgggcggggccgggcggggcggggcggggccaggcgcaccgccctcggctgagtctccccggggagggcggcgggcggcgggcggcggggaccgggtgcggtggtggctgcggcggcggcggcgggagcagcatggattggggcactgagctgtgggtaagtccaatcggcccgcctctaagttcccctttgctggggtccaggcaccccccttttgtccccaatgtatcttagagggggctccgcgcctttcccttccaccgacccctgggtccccgccctccaccctccgctctctctcgaagtttatctgggagtctcagcacgctcaggggcgaagggcgactttgccggaccggagtggggaaactgaggcacagggttgcgaatgaggcgggcagaaggaatcctggggccaggccggggcggctgagagaggtcacctattttgggcgccctggccgggcaggcggcttatcttacggcccctgggtccctgcccgtcgtccgcctgtccggctaggaggggggaggggaccctctggtcaccctcatccccacccacgtgggacctagaagtcctgaccgccctttccctcgcctttaatcaacacctaggggctggggacgctcatggaggggaagggggatgctaagctcggcctgatccccctccctggcttccccctgctcaccccaggcccagggcgggaccgccccctggtcgcctataacctcagccctggaagccccagaaatttccccctatcctagccggacctctgacccctccccttgctgggggcggtggaatccctgagttcttagtgcagcgggggtaaccagactgccaccccctcctccaattctgcgatttcttttggatgtgtagtggggtcagtggggtaaattgagtcacccatcgggggatccctggaagcagggagattcagggaacctggtgcctgccccctggccactcaggggcccccagtctgccaggaaccctgcccctctggccttgactcacgccgggccggccggattttccggaatccggggggattaggggagcccgagctgggggagtggccctgtccccttccacgcccctcttggcggtcctatgtcggagacctccatctcccggccggggtggctggggcctgggcgctgttctccggcccttcccgggaaggggagggggttcccgccagtttcctgcctccccccgcgccacgccggggcggcgccgggaagccactccttctaggagcgcagagccttggccctccctgggagtctggtcggcgggctgtggggtcccaaaatcgtgaccccggcccctctcccctcctcccccaccatgtcccatgtcaggatcagttcgaggtgctcgagcgccacacgcagtgggggctggacctgttggacagatatgtaaagttcgtgaaagaacgcaccgaagtggaacaggcttacgccaaacaactgcggtgagaccctggggtggacgctacggaggacgcgcctggggcgacggggagcggtgggagggctgcgggctcagccctcctacctctgtctccccttaggagcctggtgaaaaaatatctgcccaagagacctgccaaggatgatcctgagtccaagtaaggttggagaggggctgcagggctagatttgtggggaaaggcggtgcttgggtctcacttcccctccctcagctgggacaccccaccgctcctctcacttccccttctagaggtgagagcatggatgcaagatgcgggattatctggcttggaatcctgagtccactactatgtagagaaattgacttgggcttgtgactcaggttttctgccactattttccttaactgttaaatacagaggccccagcagttacaaaaccagtaactttgggcagatgacttaaagttttgcgcctctgttttcctcatctgtgaaatggaatgatgacgattcctccagctttgtagggctttcatgaacacgagctgagtgaatgtgtttaaacagtgtgcagtccatatcaaacgccgtaaggagcatttgacttggaattgagtccccaattccaaaatccaaaaaagccctggaaatcaagttgttttggtcacttgtttggcagcaatctctgacctgaactttttgttaattgtagttgttttgttttgtttttgacagagtttcactctgtcccccaggctggagtgcagtggcgccatctcagctcactgcaacttccgcctcccaggttcaagcgattctcctgcctcagcctccctagtagctgggattacagtcacctgccaccatgcccagctaatttttatatttttagtagagacagggtttcaccatgttagccaggctggtaattgtagttttgacttttatcccacttagtgtgaatgttaacacctctcattgtaaaattaaaaaaaaaaatagggttgggcacagtggctcacacctgtaatcccacacattgggagggtgcgcaggtggatcacttgaggtcaggagttcgagagcagcctggtcaacatggtgaaaccttgtctcttctaaaaatacaaaaattagccaggcgttgtggtgcgcgcctgtaatcccagctactcaggaggctgaggcatgagaatcgcttgaacccgggaggcggaggttgcagtgagccaagatcgcaccactgcactccagcctgggcgacagagtgagactctgtctccaaaacaaatagatacggtgtttgattacaaaatgatgtccccaaccccactaagatgatgcagaaaagatggtataagctttgtacaccatctttaaaaactggaaaattctgtgttccaatatacattcgaggtccagtgcggtggctcacacctgtactcccagcactttgggagggtgaggcgggaagatgcggagttcggggggattggagtttgagacctcatctggaaaaaaaaaattagccaggtgtggtggcgtgtgcctgtggtcccagctatttgggagcctgaggtgggaggatcacttgagcccaggagtttgaggctgcagtgagacgcaatcatgccgctgcactgcagcctgggtgacagcaagaccctgtctcaaaaaaaaaaaaaaaaaaaatctactcaagggttggggttaaggaatatggaccagaatttgtcatcgcttcagggattacattcttggggcttaacccttttccacctggaggtgcgtcctggggcatcagcctgctcgggaggaggggcctgactccctgttccccgattctcatccaaccccagattcagccagcaacagtccttcgtacagattctccaggaggtgaatgactttgcaggccagcgggagctggtggctgagaacctcagtgtccgtgtatgtcttgagctgaccaagtactcacaagagatgaaacaggagaggaagatggtgaggagccccccgattcaggttttacaaagggcttctgctggaaccctggcgagccttatcactcttctttctgtagcacttccaagaagggcggcgggcccagcagcagctggaaaatggctttaaacagctggagaatgtgagtttgcagaggtagcagtgactgtggcccggaggcatgggggcagggttgcggatccggagtcagggagctgccctctttgtcagacctggaccttccctcccccataggcttccagtactcccttgacccctacttactggatgacatcccaataatccctgaaaccttggtttcccaccctgctgtctttgggatggtggctccctcactccggttctgtcccctacacagagtaagcgtaaatttgagcgggactgccgggaggcagagaaggcagcccagactgctgaacggctagaccaggatatcaacgccaccaaggctgatgtggagaaggtgtgtgtggcgggggcggggggggggtgcggggtctgggacaagcttggggagtccgagtgggacgtgatcggaacctggcagtaccttccacctctgcattcttcaggccaagcagcaagcccaccttcggagtcacatggccgaagaaagcaaaaacgaatatgcggctcaactgcagcgcttcaaccgagaccaagcccacttctatttttcacagatgccccagatattcgatgtgagtgctcccagttctcagacctaccttcccgaaagcctccaaatgttagccaactcctacgcattcatcaaaaccccagctgcaatgtcccagtccctagattgaaagggaatcagaaacctatagtaacagtgagctgtgcttttagtcagctgttcttcctgctgggcatgccttttacttgtttgtttatttacttctatagagagatggggcctggctctgtcacccgggcaggagtgcagtggcataatcacagctcactgcagcctggaacccctgtgctcaagtgacctttctttctttttgaaattcctacttattcttctaagctccacctctaacaacccctctgaaaggtctcgaatttcccctctcctgtttcaatctagcgctccactctctgtcccatccgtggccctgggagtatcagggctggttctgctttttcttcaaatccctgttcccttgtctcctcctttgagaagcctttgctgaccccctaggcacgcgtccccctctgagatccccctggccctgtgtctcttccccaaccacagtgggctggagtctctcttcccgactctgtcttcccctccagactggcttggggctggggccagcgtggagcgcgatcatatttgcagagtgaatcactgtgcttctagtccctctgttagcacccctgagccacccttgtccctgtccttacagaagctccaagacatggatgaacgcagggccacccgcctgggtgccgggtatgggctcctgtcggaggccgagctggaggtggtgcccataatagccaagtgcttggagggcatgaaggtggctgcaaatgctgtggatcccaagaacgtgggtgcctggtctgggtccactgggctacgggaagggcagagggaggtacccataggctaggcactcgactgctcatccactgtccccctcccccaggactcccacgtccttatagagctgcacaagtcaggttttgcccgcccgggcgacgtggaattcgaggacttcagccagcccatgaaccgtgcaccctccgacagcagtctgggcaccccctcggatggacggcctgaactccgaggcccgggtcgcagccgcaccaagcgctggccttttggcaagaagaacaaggtgggggccgggacccttgggatggtgggggagaaggacagtgaagtggggacagtggggcccctattgagtcagccccagccgcctgaacgccgagtctcgggcaggaattttcctcttggctgccagcccggactggagggaaggaaggcggccgattggcctgggagtcccccgaggcgaaggcgggggcagggtggggaggtggggaggtccgtggcgtttgtctgctgcttctcgggatgctgggagaaaacctgctggtggaattcagggctggcctgagggctggtgacaccatccctggggactccccgagtttctctctccatcctgctgatgggactctgggagccgccctgcatgtcttgctttcttgggtttttggattttaatataccttagcacccttggtttatacctttgatttatactttgggtccctcttcacttacactctcatacctctccttgacttaacacctgtgatccccgagcttaaacttctgatgcccctaacccctctcattttcctgccttccactccctctcggcttgtggttttatttttgtttatttatttttgtcctctgtggcctcttacctgtctgagaccttgattcctgcatgcgtcttctagactgtcagcccagaaagctaagtggacagagagacatgggcctccctgcctcctggacccatgcttgctcccggacataacattccagagacctaggagataccgggggagtgagagttctggctttcgggcttacagttcaacatcctccccgccaccttccagatttttttgtgtcgctcctgcatgcgttttctctgtgtggttgtgcatcttgagttgtggttttcttaccgttttttttctttctccattttgtttttcctttttcctttttttgcgtccatccgtccatccgtgcgtccatccctccgtccattcgtcctcactctctacatcctcctatgcccccccaccccttcaacctatccccctccccggcccccgccggtagcctcgccccccacccctctcccccctggggggccccgtaccctcggcattgcctaacggacccccgtccccccgctccggccgtgaccccttggccatactgagcgagatcagtaagtcggtcaaaccgaggctagcatccttccgcagccttcgaggcagccgtggggtaagtgaggcctcggggcaggaggaggtggtggccctagcctgcccagcggcgggtggcgggaccctgggctcgcttcctgccgctggctgggcccctcttccctggttgcccaacccagacctgctttgctctgtgcatggcttcgctgtcaagaaccatggctggggaagggagtgaaatatctcagacgggtgcagagtctggcaggctagactccttgatcccaaattcagccctctacccaccttgcagacagtggtgaccgaggattttagccacttgcccccagagcagcagcgaaaacggcttcaacagcagttggaagaacgcagtcgtgaacttcagaaggaggttgaccagaggtaaggtggtggggtagggaaggacaggcaaggaacatgataaaatagtaaatgaacttcacttatttgtttattattttattttatttattttattatattttattttgtgacagggtcttagtctgtcgtccaggctggagtgcagtgctgtgatcttagctcactgcaatcgccacatcccaggttcaagcaattcttgtgcctcagcctgccgattagctaggaccacaggcatgcaccagctaatttttatatttttagtagaggcggggtttccccatattagccaggctgtcttgaactcctggcctcagttgatctgcctgcctcagcctcccatagtgctgggattataggcatgagccactgcccgggtctgtaaatgaatgacatttaaatggtactcaaagatctccccaataatcccaaggccccgacggttttacaggtgattcctaccacacttagttacttcttggccaggtgcagtggcctgtgcctgcaatcccagcattttgggaggttgaggcaggaggatcatctgagcctaggagtttgagacctgcctgggcaacagagtgagaccccatttctagcaaaaataaaaaaattagctgggtgtggtggtttgtgtctgtagtcccagccacttgggaggctgaggtgggaggatggcttaagcctgggaaatggagactacagtgagctgtgactgcaccacttgcacttcagcctgggtgtcagagtgagaccctgtctcaaaaagaaaaaaagaaacagttacttcttgtcttatacaagtcattccagcaaacagaaaaagtgtgaaagctgtcaacctctttaggctgaagaatcctgattcccaaatctgtggccaagaattcaataagataaaattaagggctcattttaccttatttatgatcatagaggcaaaatcctagccaagcaaatccagtgtttaaaaaataatacatcactttgggaggccaaggagggcagatcacgtgaggtcaggagttcgagaccagcctgaccaacatggtgaaaccccgtctctactaaaaatacaaaaactagctgggcattgtggcacgcgcctgtaattccagctactcgggaggctgaggtgggagaatcgcttgaacctgggaggcggaggttgcagtgagtcaagactgcaccactgcactccagcctgggtaacacagcgagtctctacctcaaataataataataataataataatacattagccgagcacagtggctcatgcctataagcccagcactttgggaggctgggtagaaggatcactcacttgagcctaggagttcaaggccagcctgggcaacgtagtaaaaccccatctcttagaagaagaagaagaaaaacccaagtaaatttttttaaaaactaaaaaaaaaaaaatccaccattggttgggttttatcccaataatgcaaagatagttcaatatcaaaaaatgtatccatctagttcaccacattaattggctaaaagaaaagcagcatatggttatctatttaatagctcaaacacttaaaatattgacaataaaaaaatctggcagattaaaaaaaaaatctttactcactctttccaggcaacaaaatcctcttcccagttctgttacataataggaatgatgtttgccacttgcaaacaggcagccaaattatattttgccatttgcatgtaacctcttggacagaatggcttttattggtgtaaagttccattcagaactctctagttcctgagtttctacggtggaggggttaagggtgcatgttctagagtcacgacaaactggacttgatttccagcttcatctcaggacttgggcagcctgttttaccttttaattcctcagtttcttcatctgtaaagtggatcaggtattagaactggaatgaagttggcagggtgcagtggtttatgcctgtaatccaagcactttgggaggccgaggcaggcagatggcttgagaccgagtttgagaccagcttggccaacatatggaaatcctgtctctactaaaaatataaaaattagccaggcgtggtggcgtgtgcctgtagtcccagctactccagaggctgaggcacgagaatcacttgatcccgggaggcacaggttgctgtgagccgagattgcgccactgcattccagcctgggcgacagagtgagactgtgtctcaaaaaaagataaaaaataactggaaggaagttgagctcagatctggtcttttccaaaggtccattatagtcgtgactacctgtatatatagacataggggagacagggatgagaaactgatgataatgataacagtatttattagtcacttactgcattctaggcactattcgaaacagtgtacatggatttattcgaattttcaaggtttcctgagagattgtatgcagacttaagatctgtcttgtttagtgttatatttatctttatttattttttcccctgcccccccttctttttttattttttaaaaattattttgattttttactagagacaaagtctcacaccattgcccaggctggtcttgaactcctggcctcaagtgatccttccacctcagcctcccaaaataatgctgggattacagatgtgagccaccacggccagcccagtgttatatttctgatgcttggaataggacctgtatgcagtaggtactcaatatgtatatgagtaatagtgaggacttactaggtatcaggcattgtattaatcctcacagtgacccacatgagatattaggatcattatctccatttccaaaataagcaaacagcagtgggggttcaatgatttaagccaagctcacacagctaggaaatattcaaactgagattcgaacccaggcagtcgggcactagtatttgcatccttaaccattgtcctgccttgctatttgctccttgatgcaaaacccctgttttttgcttgttaaatcacatggagcccggtgctgtggctcatgcctgtaatcccagcactttgggaggctgagccaggaggatcccttgaactcagcctgggcaacatagccagaccccatctctactaaaaatttttgaaaaatcaggcgagtgtggtgatgcgggtctatagtcccagttactcaggaggctgaggcaggagtatcacttgagcccgggaggttaaggttgcagtgagccatgattgcaccactgcacaccagcctggggaaagagtcagaatgagaccctgactcaaacaaaacaaaacaacagcaacaaaaaaactcacacggaagtatgttttcctgtctatcctgtctcccttgtcatagggaagccctaaagaaaatgaaggatgtctatgagaagacacctcagatgggggaccccgccagcttggagccccagatcgctgaaaccctgagcaacattgaacggctgaaattggaagtgcagaagtatgaggtcaggaaagaccctggggaggggcgggagccagcgggcctggctgagtcactgctgggtggggtggggggtcggggacaggggaggtgttcggagcggggggtctccagctgttttccatcacagccttggctgtgcgtgggtgatctcagggaacctctgggtccaaagtgggctgaccccggagctctgccctggaacgattttcctgtcccctcctcccaggcgtggctggcagaagctgaaagtcgagtccttagcaaccggggagacagcctgagccggcacgcccggcctcccgacccccccgctagcgccccgccagacagcagcagcaacagcgcatcacaggacaccaaggagaggtgaggggtgacgtcagagtgggtctgttcccagggtcccaggagggcctgtctttatctgccgaattatccccaaacagctctgaagagcctccctcagaagagagccaggacacccccatttacacggagtttgatgaggatttcgaggaggaacccacatcccccataggtcactgtgtggccatctaccactttgaaggtgagaacggccagagtgggcttggcggggtatgggaggcagtgtctctggctaggttcagtttaaattcgcctaaagcagggctgggcgggtggctcaggcttgtaatcccagcactttgggaagctgaggcaggcagatcacttgaggtcaagaattccataccagcctggcgaacacggtgaaaccccatctctactgaaagtacaaaaattagccaggtgtggtggcgcacgcctgtgatcccagctactcgggaggctgaggcaggagaatcccttgaacctggaggcagaggttgcagggagccaagatccgtgccactgcactccagcctgggcgagagcgaggctctgtctcaaaaataaaaaataaaaataataaattttgcctaaagcagatctgggcccacccccacccccatcacagggtccagcgagggcactatctctatggccgagggtgaagacctcagtcttatggaagaagacaaaggggacggctggacccgggtcaggcggaaagagggaggcgagggctacgtgcccacctcctacctccgagtcacgctcaattgaaccctgccagagacgggaagaggggggctgtcggctgctgcttctgggccacggggagccccaggacctatgcactttatttctgaccccgtggcttcggctgagacctgtgtaacctgctgccccctccacccccaacccagtcctacctgtcacaccggacggacccgctgtgccttctaccatcgttccaccattgatgtacatactcatgttttacatcttttctttctgccgctcggctccggccattttgttttatacaaaaatgggaaaaaaaaaaaagaaattatataaagttcctagagtcggtgtcttattagaggatttaaatactgggactggaagtatctaacaccacgtttcttacaggccacacagggaatgaggaaggggaggtgatcttgggcacaccttgggtcaaccctgcccctttctggaagttggcctatgtcattgtcagtgggtgtctgcttgtgactcaggtagggagaaggataccaagtttcttttttttttctttttgagacagtctcacccagttgcccaggctggagtgcagtggcgtacgtgatctcagctcactgcagactccatctcccgagttcaagcaattctgcctcagcctcccaagtagctgggattacaggcacacaccatcatgcccagctaatttttgtattttttgtagagacagggttttgccatgttggccaggctggtcttgaactcctgacctcaagtgatccatctgcctcggcctcctaaagtgctgggattatggcgtgagccaccgcacctggccaggacacccaagtttcatcccttctgaatgcactgcagcttctgagaatgggtagcacttattgaagacctactgtgtgccaggcattctccacctggggtctcattcctggccacaattcttagaaagtacacagcctcaacttttacattttttaaaagttttttatttttcagtttttgtagagatgaggtctcaccatgttgccctggctggtcttgaactcctggcctcaagccttccttccgcctcggcctcccaaagtgctgagattacaggcctgagctgctgtatggctatgattttgttaaaggccgacacagaggtgaagtcaactgctagaaatcacggcttttaagaggtggagtcacatttgaactctggcctctgatgccagatctgcaggtcacatgttcaccatggtccaggtgaccctgactgcggtccccacctcttctgtgaggcacagggcaggattccacctgaggcgcgaggagcctgggacgactcctttggtctcttctggggttcgcaaaaacctgggggtcccgggtgtgaagaagggtgtctgcgctctcagcggtcaggctccaggcgctgcgacaggacgccgaggacgcgctggaacttctcaaagcgttcagcgcgcggagctcccgcgccccggctaccccagagcagcctccgcacgaagccggtggtcagggcctccctcagctccgggttaggccggaatcctggaagcaaggtcaggtgggctgggggcggggcccaggcgcccgcctcgcccctcccaacctcccggcaccttcctttccccagaggactttgacccaacaggggcccgggagggacctgccccacctgcgggatgactaggcggggtcagaggggagggggcttccagctctctgcaggaatgggggtggggtgcctgaggggctctaccgcagtgcaatggggtggcctgttccaggtgccagatcctggaggtcccgccttaggggctgtgcctggacgtggggctgccccgaggacgggatcccaggttgtcggggaaggtggggggatcttgccgggtgggctgccctaggataggacggaggagtcgttttggagggagcagggcgttcttggggatcgagatccctgggggacgggatcgtcttaggtgggaagggggagtggggacccgcggaggtggctctgggggcaggacagcccgttttgaggtggacggccctgttcctatcaataccgctggatgcagcgtttgcttggggtgagaaccttcctggagtggagccgtcccagtttgggtggggctccgggaggcgtggcgagaggctcccctcctgggacaggctgggtttgggggatccggttagaacctgcagggtgctctgaagtctgcagtccagcgcagagggaacgctcacctcgcaggcgctgggctgccaccttgcggaatttgggtgcgtcccggaccatgtgacgcgccccgtgcagggtgcgcaacagccgctcacagctctcgtccagcggccccgcgacttcctcgccctccagtaggcgaaccatgggtgccacgtgcggcagcgccacctcgccggggtcgcagggtcctgcggagggggagggtctgatcagggtttggggctgtagatggggcatagggcagaggtggaacctaggacaaatgcaggggcggggcttaggactgagcgacagcggggtctgtggagaggggccaggaccacacgccccgtatggagggcggggcctatggcgaaggggcgtagcctagggaaaggggctgggaccaaggctggtgggggcgtggcctaggaacaagtctcgtgtggagggcggggcctagggaaagggccaggaccaaccctcatgtggagggcggggcctatggtgaagggaccgggcctagaacagatgcagggactgggcataggactagattgagtcctgttaaatttggtctgggcccccaggggatgctaagccccagaccttcacttaccagcgccctcatccagagcccgcatcagcggcttcagctcctgctcaaaggccagcgcagcctccgtgtggctccttcggagctggcgccacgtgtgctccaaccgggacacctgggagaagagatctgagcacgcctcctctccagtcttcccagtcacccgcactccagcttcctccagtccctgctccccacgaacctggggcatgagcagggcgcccatgactgcagccagcccgggcaggtcccccgccgcccctggccgcagcgccagcgccagctctaccagtcccctcagtgcggctgcgcgctcctccagcggccccgagcagcccagcaccgccagcgccccggccagcgccagtgtctgatgcctgcagaggtggagggcaagggtctgggggaagtggggaggtttgtaatgcaggggtgaggggggacaggaggtggcattgccccatctcccttcttccctggggaaccatgagtggggagctgtttggagatcttgggaagtggggggaattggcctcccccaaccaagattacaagctgctggctcacctctccagcagttccaacctcaagtggtgtccatggggaagagtgagcagctccaggccagatgagactcccatgttgccccgctgatctctggtcactcccaggaggcctgtggcctgcagaagggaatggggaagtcaggtgaagcgtgattatgtaggcatggttgggtcttgccctgggcctggggaggagcatcccaggaggtgacccacctggcagtctaccaatagcaggtgaagggcggtgctcccaggatggtgctccaggaacaggccacggagggtatgcaggacttggggttccaggggccgattctgggggcccagcaggcaggagggggcatcatgggggcagaaagagatctcagcctgtggtcttgtaaaacatctattctcttcctcctcatcctcctcggcctcccaccatggggcctctggctctgggcagctttggctcggggatgttccctggacactgggcactcggggcaccagctcgcagtacgtcgggggacgttcagaggcatcaggcagttcgaaggagggtgtccgggggggcttcgttggtgccttggcttgaagctgcccatcggaggccctgagactgtcggcaacagttcccaggggagcaggggccttcagcaacaccgggtcactgctcgttcggggcaaggcagatatgggcatggtggaggcttctagaggtcatacaagaggggtcaatgggaatacacagggaagattgctgaatgggcgggggtgagagcttcatcggctaccacccacctgatccatccactcattccaataatggggtataacaacctatccgggtgcagttttgaatttcaaccacctcgacggtagaaatgctacatgcttacacatggttagaaaactttagcatctctatagttctgtaaattatttttttttaattttattttattttatagagatgggatctcactgtgttgcccaggctggtctggaattcctagtctcaagcaatcctccctcctcggcctcccaaactgctgggatcacaggcatgagccaccttgcctgaccctatgaattctgaatactacattttaaatttgaattctttgtttttgcccctctgactgaaagatggtaagcagtgacccaacgaaattaaaaatttttttaaaaaaaggatgagcgtggtggccgacgcctgtaatctcagcattttgggaggccaaggtgagaggattgcttgaggctagggattccagaccagcctgggcaacataacaagatcttgtttctacaaaaagttagaaaattagctgggcatggtggcatgcacctgtggtcccagctacttgggaggcagaggtgggaggatcacttgagccagaggctgcagtgaggtatgactgcaccactgcactccagcttggatgacagagtaagaccctgtctcaaaaaaaaaaaaaagatatctatctatctacaattaagtgatatatctctctatatcatatctatagagatagatatatattatataaatatataatatatatttaaattaagtatatgttaaataaaattaacattattaaatgtataatgttgccctatatactacatataattacatttatatatgatagatattttactttttttgtgataatatatctctccatagacatatctatataaaatatatacaattaatatagatatctatagagagacaaagtataaaaaattcacaaagctgcgtatggtatgacactcagataagtgtcaaagaaaccaagcttattaaactttcttttcttttttttcttttttatttcttcttaaaaaaaaagatacatgtgcagaatgtgcaggttcagtatctgtgtgccatggtggtttgctgcacctactgacccctcctctaagttccctcccctcatcgtaaactttcaaatgacgtcctttgtaagttggtggcatgttgatctcctggactattagtacttaaaactgtactaagacttttgggagactgtatttaccatgcctttgaataggctcttttctaggaacttgaaatcatccaacagtgcctggctcactctgagttaaggtccaaagtgctcacagtagctgaaaaatcctcacaatctgagccccagggtctctctctctgactctcccctcattccctctgcttcagctacactcgtgtgtccctccttccctccctcccttcgttccttccttccttcctttcttttctttcttgacggagtctcactctgtcaccaggctacagtgcagtggcgccatctcggcttattgcaacctctgcctcccgggttcaagtgattctcctgcttcagcctcccgagtagctgggaccacaggcgccaccacacccagctaatttttgtatttttagtagacacggggtttcaccatgttggccaggatggtcttgatctcttgacctcgtgatccgcccgctttggcctcccaaagtgctgggattacaggcttgtaatttctggactattagtacttaaaactgtactaagacttttgggagactgtatttaccatgcctttgaataggctcaacctgcacattctgcacgtgtatctttttttttttttttttaagaagaaattgagccattgcacccagccctttcttttcttcttctttttttttttttttttaaatttgagtcagggtctcactctgtggcccaggctggagtgcaatggtgcgatcacggctcactgcagccttgactttctgggttcaaggagtcctcctgcttcaacctcccaagtggctaggaccacaggcgtgcaacaccacacccagctacccactcattttttggttgaatgaacagcttaaattcttgttctgacccaagagcctttgcactgcctcttcctcctgcctgcttatcccccagttatccacctgttccctccctcatttccttcaattttatttttttctgcaatggggcctttcctgactaccacttaaaattgcttgcttgggtacaatggctcacgcctgtaatcccagcactttgggaggttgaggtgggtggatcacctgaggtcaggagttcgagaccagcctgaccaacatggggaaaccccatctccactaaaaatacaaaattagcagggcgtggtgcacatgcctgtaatcccagctactcgggaggctgaggcaggagaatcacttgaacccaggaggtggaggttgcagtgagccggtatcacgccattgcactccatcctgggcaacaagagcaaaactctatctcaaaaataaataaataaatagaaataaaataaaattgcaatatacatctccatctttatagtctctatctcccttactctgttttttttgttttgttttgtttttgttttttcggtttttttgagacagtctcactctgtcccaagtagcttggattacaggcatatgccactacacctggctaatttttgtattttattttattttatttttttttagtagagatgggttttcaccatgttggccaggctggtctcgaactcctgacctcaagtgatccgcccaccttggcctcccaaagtgctaggattacagacctgagccacctcacccttcccttactgttttttgtttgtttgtttgttttttgagacagagtctcactctgttgtccaggctggagtgcagtggtgcaatcttggctcacggcaacctctgcctcccgggttcaagcaattctcgtgcctcagcctcccgagtctcccgagtagctgggattacaggtgtgtaccaccacgcccggctaatttttgtagttttagtagagacggggtttcgccatgttggccaggctggtctcgaactcctgactttaggtgatccgcccgccttggccttccaaagtgctgggattacaggcctgagccactgtgcctggccttcccttcctgtgttttaattttcatcttgaagcaaacaaaattgccttatttttgtggttcatggtttgttgtcctctcgtggactgttggctcccatcgggcagggatctttgtctctttctggtttgttgatgtatcctagcactccgtgcagggcctgggatgcagggacggctcatgttgaatggggttgggagaaggatgggaaaaaaggggcatgagggggcattcaggtgagtcctcctttaggtaagaccgtcagactcaactgctttgaggaacttaccctggatggagaggagccactcaggaaaaaattaggggaatgagaatgttcccgtcactggtggaaatgtaaaatgcaaaggccccgaggcgggaataaaagcctgagggttcgaacaactgcaaggagggctgtgtgaccagcatgaggagggtacgtagcagaagttgttagcaaggtaagctgtggtcagaacaggtacagctccttggaataattgtaaacacttttttttttttttgagatggagttttgttctgtcacccagtctggagtgcggtagcgccatctcggctcactgcaacctccacctcccaggttcaagcgattctcctgccgcagcctccagagtagctgggattacaggtgcgtgccaccacgctcggctaattttgtgtttttagtggagatggggtttcaccatgttggcaaggctggtctcgaattcctgacctcaagtgatccaccggcctcggcctcccaaagtgctgggattacaggcatgagccaccgcgctcagccttgtaaacacacattttaagcacccacaaagtccctgcatgttttaagtcatcgtgattgtcatcattttctaaagcaagaaattgaggctcgaagaggtgcctgcacctgaccaagatctcttaggtggtgagtggcagagccaatccctgagccacaggccattctagcagacacttacccatcccagcggggtcttctcttgaccgccccatatgtgccaaatctgcaggctgactgttgctccacttccttgccctgggggacagaagtgggagaaacctgtagtccccacctaagcagtgtcccccaccaatatctgcaaaaccctgtgtccagttactctgtaccagtgagtctcaaccaatcaaggtgacctacgtccaggggactcttagcaacgtgtggagacatctttagttgtcacaactagtagcatctagttggatggagctcaggaatgctgctcagcaccctatgatgcacaggacatctccacctcctcccccacaactaagaatgttcgggcctcaaaagtcaaccaaggccgggtgcggtggctcacacctgtaatcccagcactatgggaggctgaggcgggcggtcacgtgaggtcaaaagttcaagaccagccaggccaacatggtgaaaccctgtctctactaaaaatacaaaaaattagccaggcgtggtggctcatgcctgtaatcccagcactttgggaggccgaggcgggtggatcacttgaggtcaggagtttgagaccagcctggccaacatggtgaaaccccgtctctactaaaaatacaaaaaattagccaggcatggtggtgcacgcctgtaatcccagctactcgggaagctgagacaggagaattgcttgaacccgggaggcggaggttgcagtgggctgagatcgtgccattgcactccagcctgggcaacagagtgagacttcgactccagagaaaaataaaaaataaaaaagtaaaaaaattagctgggcgtggtggtgcactcctgtaatcccagctactctggaggctgaggcaggagaatcgcttgaacctgagaggtggaggttgcagtgagctgaaatcatgccactgcactccagcctgggcaacagagtgagactcagtcaaaaaaaaaaaaagtcaaccattgagttggaaaaccctgcgagtgttgggtgttctcaaggaggcagggagactgtgagtacctgagaggctctatccgagctgggccatccatcagggtgtcctcgctaaagctgcgtcgcagaggcccctgccaagtcacaggcctggagaccacagcccctgtggcctgggacagtgggcgcctgcctgtcatataactgtgaaccagagccggtatgctggggaattgctcatcctccagttgaaagagggctgtgggtcggcctggccggggacgcagggccacacggaacacctcaaaatggagggctgagccccgccagcggcaggagatcacggggttgcccccacgggacccagaggcgcgaaccaggaagtcgccattttgctgaagaagagcttcagccttctgtggatgaagttcagggggcaggggaattaggaatgagtccagggcagtggttaatggtagctccccccaccattgcccccaccacccaagaaaagctaccccagtgaaacttctgtggcaggcaaagacggggaactttcacaccaagttctgtccccctttctcctggcacctacgtagactacatttcccaggttcccttgcggctagggttgtcatgtgatgagaactggccaatgggatgtggggtagaagggctatgggaaatatccagacctggcgcataaaaccctgctgcacaatcttataggttgtgtcccctgtctgtcagctgatatcccccaaagcccagagggatgacagagctacaagatgcacttggctcccaactgatttatggagctttgcatctctgcttctcaaccaccttggactatgacattaacatgttgactgtgtttagctggtgatatcttgggaatgtttgttacagccactagctgatgctgaccaatgcaacatctaatttggtaaatgcactgtgcttgttatgcaaatgtggcttcaagagaagccattagctggatgcttccagattggggccccctcttttataaacatttgcaagcagtcttatgccagctgtggtggctggtgtcaaaatagggtaggaagggtggggcacagtggctcacacctgtaatcccagcactttgggaggctgaggtaggcagatcacttgagatcaggagtttgagaccagcctgggcaacatggcaaaaccctgtctctaccaaaaaatataaaaattagctgagcgtggtggtgtgcacctgtcattccagctactcaggaggctgaggtgggagaatcgcttgaacccaggaggcagaggttgcagtgagccgagatggagccattgcactccagcatgggtgacagagtgagatcatgtctcaaaaacaaaaaaaaaacaaaaaaaaaaacaaaaaaaaggcttggggaggcaggtagaagggccaggaccccagagagaggcaaagtagagctgaacatggggtctggggactaaataatagatgtagcagacacacgtgtgtagcccttactatatgtcaagcactgctttaaatgtaaagggtgttaactcttgtaattcctgtaacaagggtggtaggtattattatacctttttttgttgttgttctttgggacggagtttcactcttgttgctcaggctggagtgcaatggcacaatctcggctcactgcaacctctgcctcctgggttcaagcgattctgctgtctcagcctcccgagtagctgggattacaggtgcatgccaccatgcctggctacttttttgtatttttagtagagagggggtttcatcatataggtcaggctggtctcgaactcctgacttcaggtgatctacccacctcggcctcccaaagtgctaggattacaggcatgagtcaccatgcccggcccatttttttcttccggccttttttttttttttttttttttgagtcaaggtctctctcgattgcccaggctgagtgcagtggagcactcatggctcactcacagccttgacctcctgggcttaagcaatcctcccatctcagcctcctgagtagttgggacaacaggtacatgccacccatgcctggataattttcgcttttttttttttttttgtgtagagacagagttctgctatgttgcccagactggtttggaactcctgacctcaagtgatcctcctgcctcagcctcccaaagtgctgggattacaggcatgagccaacatgcctggcctgctatccctatgttaaagatcgggagactgaggcccagagaggtcaaatgtcctgcccaaggtcacatacaatataaattgtagggtttggatttgaacctagggtgtctgggtctcaattatgggattttaactattaagttctactgcctctcatgatttcatgagatgctcagggtcccagaatttttgggggtgacaactgagtttcagatggaggtgggagcctcagatttatttgtttgtttatttatttatgtttttgacagagtctcgctctgttacccagtctggagtgcagtggcacaattgtggctcactacaacctctgcctcctgggttcaagagattctcctgcctcagcctcccaagtagctgagactacaggcgcataccaccatgtctggctaatttttgtatttttattagagatggggtttcacaatgttggccaggctggtcttgaactcctgacttcaagtgatccgcccacctcggcctttcaaactgttgggattacaggcgtgagccaccatgcctggcttgggagcctcacatttagagggaaataccaggaggtagatggagttcagagggagagacggccagagccaagagtagtttgggggcattaggactctccttaagctccatcaccaatctcatcatcccaaagaaagtgataatttaaatatagtgacagtccccagccagccaaccttcaagacagtccccagccctctgccacctgtcccaatagaccttggcactaagtccctcatccagggacccaggaatcctcagcaagggtgggagaggctccccaccagatggtgctgaggtcctgctgtgggtggtacctggcgggacaggaggccgtggtaccaaggttggccagcaaggtcttctccatcctgtggcacctgcatggagctcttgggaacagagggtgccagggctgagctctgcactttcaacaggcctcagtcttccacatctgtaaaaggggaataattagccctgcttgagtgtctgggtcagctcctttcatcctcttcttaattttggagacagctccatcaaatctttttttttttttttttttttttttgagacagagtctcattctatcacccaggctggagtgcaatggtgcgatcttggctcactgcaacctctgcctcccagattcaagcgattctcctgcctcagcctcccaagtagctgggattacaggcatgcaccaccacacccagctaatgttttttctttttttatatttgtagtagagacagggtttcactgtgttcgccaggctggtcttgaactcctgacctcaggtgatccacctgcctcagcctcccaaagtgctgggattacaggcataagccactgcacgcagacttttttttttacatttaaagagagaggtcttatgtgttgcccaggctggagtgcagtgctattcacaggtgtgatcatagcacactttagccttgaattcctgggctcaaggaatcctctagcctcagcctcccaagtagttgggattacagatgtcaccatcgtgcctgttccaaatataatgcaatcgaagaaaaaaaaaatggctgaagatgacaacatgccaccccatcttgcagaaatgtaattaatgaattcactgaacccctatttattcagcaccttatggggtcccaggctctgttctaggccctagagacatagcattgaacaaaacagatggaaatctctgtccttgggagctgacattctactggggagcagcacctcagaaaagaactagatgatggcatacatgagtgagtgctagacaaaaaaactaaaccatggatgggatataatgaaagtacaggtgctagggtgaacactcttttttttttgagacagagtcttgctttattgcccaggctggactgcagtggtgcaatcacagctcattgcggccttgacctcctgggctcaagtgattctcccacctcatccttctgagtagctgggactatgagcgtgggccactgtacctggctaatttttttttttttttttttttttgagatcaagtctcactctgttgcccaggctggagtgcagtggcatgatctcagttcattgcaacttccgcctgctggtttcaagcaattctcgtgcatcggcctcctcagtagctgggactacaggtgtgtgccaccatgcctggctaatttttaaaatatttttaatagagatggggtttctccatgttggccaggctggtctcgaactcctgacctcaggtgatccaccctcctcagcctcccaaagcactgggattaccagcatgagccactgcgtctggctgtgcctggctaatttttaaatatatatgtagagattgggtcttgccacgttgcccaggctgggtgaacatttttgatcatgtgaccaggaaaggtctcattgagtaaagtctggaaggaattctggggagtgtgccaggtgactctgggtgaaaaaacatcccagtcagggggaatttaacttacaaacatccatggcttctcggcaacctatgcgcacactcagaggttctcaggataggtgcagatctaacccctattctttgctttagaatgcaacgctgggggccaggcgcggtggctcactcttgtaatcctagcactttgggaggcagaggtgggtggatcatctgaggtcaggagtttgagaccagcctggtcaacacagtgaaaccccgtctctactaaaaatacaaaaattagccaggcatggtggcgtgtgcctgtagtcccagctactcaggaggctgaggagagagaatcgcttgaatccaggaggcagaccctgcagtgaaccgagatcacaccactgcactccagcctgggtgacagagcaagactccgtctcaaaaaaaaaaaaaaaaaaaagaatgtaaccccagggttaagatttttaaaaggtcacattttgtagcaatgtcagcaaacagcaatgttgcctttgcagatccttctatttcggagcccatacatgtggttatcatgatgattgaatttggatctcagacattttggtagtttcccgataatctcacaggcctcagggccagtgtgtctcaggtgtctggtgggggagatttctctggatggtccagaagaagataatctgcttcttactctcctgcaagctctccctgcagccctgcaaagtcttctggtggggtctgcagagaaattcctgcctcctgagtcagcaggaagttcccagaccagccctaggtggctttaggggaggagcgctgggcagggagccagctgccagtgccgcatacctgaagccaggtgtgtctttgcaatgcctgcgcacttcctgtttgtcacctggaccagggctagcctcggtcgcagagtttcccaaccccaagttcctgtcttgtgtctcccttagtgagagtgaagttgagtcaatggcaaggttctggttagtttgaggacacagggtggccataggtcagccaaaggccaactaagccatctcctgcctctgagtcctttgggatcatttattcgggcacggaagagaagaaacgggcagaatcaggaatcagaccaagcatagagagaggagagaggggattattcatgttccagttggatcataaacatgtgtccacgtgtggggaggacgtggagggtgggaaccaccagcacaggcaacacaaacacagatgtaggcaggactcgcttttgacgttggacgaccattgctggagcacttgctgtgcaccaggctctgttctaggacctagagatacagtgactaaggagattaaagctcggcaccaccctgccctccagagcttgcagtcggctgcgcaagacagactgcaaacgagcacaagatgaatggagaagacagaccatttctaagagttatcaatgaaagtgataagccagggagatgtgatagaggaggctggacaggacagcctctcctataaagtgacattggaactgagacctcagtacagaaggaggcagttaggcaaagatttggaggagtcgcctgggtgaggggtacagtaagggtaaaggcctggagctgagatggacttgctttttacattttacatcatcaaggcggctggtgtagccggaatacgatgaggaaggagtagataggagggcaatgaggttggagagatcaggaggagagactaggcaaaaactagtggactttgaattttaatctctatgacccaagggttttaagtgaaggaggggcccgatctgattcgccgtttaagaggatcactcaggcaaaaatggaaacaatggctttctgtgctgcacaggaaatacacttagagaggcacgcccaggtgagcccgagcacaccgacacgcgtaacgcacagcgaccctctcattcgcgaggcgacctcttctaccccagatcctccctgcgagccggtgaccccacctggaaagagaggactccccatcccaataatcctggttctggatctgccctggggctccactcacctgggcaggacccgcggggctcccacgaggctgggtccaggcggaagctgaggctccgcggctccgggctgctgtcacccccgccctccaccttgccaccgccccagccttcccagaccacacctagtgggaactcagcccagttacctgaccacacctcctgcagaccccgccccctgcgggccccgcctcaaactaacttcccaggcccttgctccgcccccttaaaaccattttttttgctactagccacgcctccttctgcatcgcaccgctttctccatagaccccgcccactaggggagcaccacgcatcctttcctgccagtggcccctccccttgtatatagccacgaccaccgccgaatgactacgcccacccgcagccacctccttctcagccccgccccttagggcaatagaagaaatttcatcccaacgttcccgccccttagaaccctgcccctcccttccacccaggcggccccaagcacccatggccctttgggaccagggcggggtggagtggggtgcctctctcccctccccgccaaggctccgggtcagggcagggcaactccctcgggctcttacgccaggctggggtagctgcggcagctgtgacgtaaggaggggtacgcttcctccagaccgccctcccggattttccggaaagaagccccatttaggtggcgggttttgtggagagacgtccgggaaaacgcgacagcttccttcagtgacagcacgctggagcggggcgggactttggtggaggtggaaggcaaatcattcaggtggtttcccaggtgggaagaagggtgggggggacttccatcgtgatgcctggagacgaacaagagaaaaggtgacagggacctagtgcaagagagaggactctttggccacgtttattgatgagttcctcatattaacatcagtcttgtcttgtagagacagggtcttgctatattgcccaggccggagtgcagtggtgatcatagctcactgtagcctcaacctcctgggcttaagctatcctcccgcttcagccttccaagcagctgagactaaaggtgcacaccaccacacccagctgattttattttattttttgtagatgtggcgtcttactatgctgcccaggctctggaactcctgggctcatgcgaacttcctgccttggcctcccagagcgctgagattacaagcaagcatgaaccactgtgcttggccccagtaaccacagtcttaaaagcagtagcagcagctaacatttattgagcacttactgtacacaagggctgttctgtcaacttgcctttattttattttattttattttttgagatggagtttcactctcgttgcccagactggagtgcagtggcagcagtctcagctcactgcaacctccacctccccggttcaagcgattctccggctgtagactcccgagtagctgggattacaggctaatttttgtatttttagtagagatggggtctcggccagactggtctcaaactcctgacctcatgtgatccacctgcctcggcctcccaaagtgctggggttacaggcatgaggcctctattttaattttcaaacagaccaccctgtaagggtggtaggtagtattttcatcacttccattttccagatggagaaactgaggcacagggcaactaaaccatttgcccaagttaacctggcttgtaagtggtagaggcgaaattcaaacccggagctctggagctttatcctgtctgcctccttttcaatcttcgcatgcccactttctccacgatgctgctttgcggtgaaagttactcacccaccattttacagatgaggaaattgaggcctagagggccaacgatgcttggggatgaaaagttttgatgcctgtaggttgcaaagcagggaatttccagactgggctcccccgactggccctggcaaatatggaagagactccaggctcaagaggggaagaaagtttcttccttatccctcaccggtctggtattggtacagtcagagggtaggggcatgttcagggaaggggtctagcgcctcctcgtggttataataatttaaaaagagggcccagcactttgggaggccgaggtgggcagatcacctgaggtcaggagttccagaccagcctgaccaacatggtgaaaccctgtctccactaaatacaaaattagctgggtgtggtggaatgcacctgtaatcccagctactggggaggctgaggaaggagaatcacttgaacctgggaggcggaggttgctgtgagcagattagctgtgtgtggtggcatgcacctgtaatcccggctactagggaggctgaggaaggagaatcacttgaacctgggaggcagaggttgctgtgggcagagattgcaccattgcactctagcctgggcaaccagagtgaaactttctcctaagaataataataacgataatttaaaaagaaactccatgatgagggccacgtattaggtggacgggggagggcctgcttacactctactggggtggaagctagggatgggggcagagagacctaatctcatgaagatgatttcagctaatgataaggtaatggccgggaagccagtaaatgtttgttgaatgagttaatgaaagacactattgggcctggcacagtggctcgtgcctgtaatcccagcactttgggaggctgaggcaggtggatcacttgaggccaggagtttgagaccagcctgggccacatggcgaaaccctgtctctactgaaaatacaaaaatttagccacgcatggtgacacctataatcccagctactcgggaggctgaggcaggagaatcacttgaatctgggaggcagaggttgcaatgagccgagattgcgccactacactccagcctggtccatagagcaagacaaaaaaaaaaaaaaaaaaagacactattgtagtctataaggagagggatgatggtggcttggatttgggtggtgaccatggacatggtgataaagggatggatttgggataaatgtcaggtgcagtcaatagagctttcaattatttattcattcaacaggtatttaaggggcatgcctatgtgtcaggtgctgcataagagaggggtcagtagtgaaccaaagaaacataaattcttgaacagacaataaagaaacaatgatgagcgggtgccatggcccacgtctgtaatcccagtactttgggaagccgaggtgggaggattgcttgaggccaggagttcaagaccagcctgggcaacatagtaaaagcccctctctgcaaaaaaatttaaaattagccaggcacagtggcacaagcctgtagttccagctacttgggaggctgaggcgggaggatcacttgagcccaggagtttgaggctgcagtgagctatgatcatgccactgaactccagcctggatgacagaagaaagagcctgggcacagtgactcaagcctgtaatcccagcactttggaagaccaaggcgggcagatcacttgaggtcaggagtttgagaccagcctggccaacatgctgaaaccctgtctctgtgaaaatacaaaaattacctgggcatggtggcaggtgccagtaatcccagctgcctgggaggctgaggtcagggaaaacctgggaggcagagcttgcagtgagctgagatcatgccactgcactccagcctgggtgacagaatgagaccctgtcaaaaaaaaaaaaaaaaaaaaaaaaaaaaagccgggcgcggtggctcacgcctgtaatcccagcactttgggaggctgaggcaggtggatcacctgaggtcaggagttcgagaccagcctgaccaacatggagaaaccctgtctctactaaaaatacaaaattagctgggcgtggtgatgcatgcccgtaatctcagctacttgggaagctgagacaggagaatcgcttgaacccaggaggcagaggttgtggtgagctgatcacaccactgcactctagcctgggcaacgagagtgaaactccgtctcaaaagaaaaaaaaagaagaaagaagcctggcgcggtggctcacgcctgtaatcccagcactttgggaggctgaggcgggcggatcatgagatcgggagatcgagaccacgatgaaaccctgtctctactaaaaatacaaaaaattagccagacgcggtggcggacgcctgtagtcccagctactcaggaggctgaggcaggagaatggcgtgaacccgggaagcggagcttgcagtgaactgagattgcgccaccgcactccagcctgggtgacagagtgagactccgtctcaaaaaaaaaaaaagaagaaagaaacaaagagagaaagaaaggaaagaaagaaaggaaggaaggaaggaaggaaggaaggaaggaagaaaggaagggagggaaagagggagagaaaggaaggaaggaaaaaaataacttaaaaaatcagatttgttggacaaagatcagggcttaacctagggaggtgggtagagctaatggaatgcggaaaaggctgtgatttgaaatgaggggatttaggaagacctcatgagaaggtagcatttgagcaaagacatgtaggggtgagggagctagccatgaagttgcttaaggtggaggacacagcccgtgcaaaggccctggggcagggccgtatgttcctggcatgttggaggaagagcgaagaggcccgtgtggctggagcacagtgaagagggggagagagggagtggggagggcagggagggaactgggcaattcaagcagggttttgtgggccttggggaggacttgggcttgtccctggaggaaagtgggagccatagagagttgtgggcagaagaagggtgtgccctgactcagatgctcacaggcaacctctggtggtggctgcagggaggacagactgtggggtacgggggctggagtcagaagaccagctgagtgatgacggggctggaccagacagaggagggggtgagaagtgggtgaattctgggtatatttcagagtgtcactgccgccgtctgcatatggaggaagctcacccatctcatagtctagctggcctgactcccccagccccccaactccccatgcccaggcctgtgtcgagtgggcggaagaaagagatgtcagattctgcatggaaggcgtggggtggggctgggctgcaggtgctcccccagctcccccccgccccatggctcctcctcctccaccccctctcagggcgacagttacaggcaaagaagaggaagtggtagcactagctgtcgctccacaggcgagcagggcaggcgtgcgggcgggtgggtggtggaggctgcgagggtgcacggccggccctgggcaggcggtagccatggagctgtggcgccaatgcacccactggctcatccagtgccgggtgctgccgcccagccaccgcgtgacctgggatggggctcaggtgtgtgaactggcccaggccctccgggatggtgtccttctgtgtcagctgcttaacaacctgctaccccatgccatcaacctgcgtgaggtcaacctgcgcccccagatgtcccaggtgagccctccgcgggcaggtgtgctgagggttggagacgggggtcctccccggggctgacagtcgaggggctgacgtgctgctccacctctgggcctgcaaaggagagggaatatgcttacaggtccagggctggcccagggggtggtcacaatctgagattctggggtggcctccccaagcttaacaggctccctgtgtgggttcacgggccctgagttggcccgcatctgggctgagaactggcaaactaggggttaactctctcaagccccaggcgcctctactgtggttcatgcccccagatgggaccaaccagaggtctcgggggagctccccagaacccccagggtggccattgggttacctgaggctttggactcctttgacccccagagtctggatgtgggggaggagcctccgccaacatcttcccccacatgtgtctcctcctcccgggccctgggccccttccttccccttacatcttccttccccttggcttcctgcctgggcctggggcagcatggggcaggtggggggctgcagccccagggatctgagcttcctccctgcatccatctcagaggagatagtaaggcagggcccagtcctgggctcagagagtgggtcctgaggtcttggtgcttggaagagctgcattttctcggcagggatttctgcaggggcccaggctggaggggtggtggtggatttgactgtggctgtatgagactggctcaggaaatatattcaaatccctatttgaatgtggttgggtgggcgtgtgatgtggctgcattatgttgctgtagcatcatgtctggttccccagggctgctgggtgggaacgggggacggggcggggctggtggagtcccatctcctctgggatgaaaggagatacagccctatcctggggcctgggggacacagtcctgccctgaggtctgaggggacagctcccatctggtcctcaggctggccctgcagatgaagagctgggaggataagttaatggagatgggcccatgggggttcctggcgggtggttttcaggggcagggccattggtggaagagatccatgcgcctttactccttctgtttattttatttatttatttatttttttgagacggagtctcactctgtcacgcaggctggagtgcaatggcaccatctcggctcattgcaagctccgcctcccaggttcacgtcattctcctgcctcagcctcccgagtagctgggactacaggcgcccgccaccacgcctggctaattttttgtatttttagtagagacaggggtttcaccgtgttagccaggatggtctcgatctcccgacctcatgatccgcccacctcggcctcccaaagtgctgggattacaggtgtgagccaccgcgcccagcctttttttttttttttttttttttttaaagacagggtctcactctgtcgcccaggctggaggcagtggtgcgatctcagctcactgcaaccttagcctctcaggatcaagcaattctcctgcctcagcctcctgagtagctgggattacaggcgcccaccaccacacctggctaatttttgtatttttagtagagacagggtttcactatgttggccaggctagtcttgaactcctgacctcaaatgatccacccacctcggccttccaaagtgctggaattacaggtgtgagccactgtgcccggctgctccttctgtttttttttatcttatcttttattttttgagatggagtcttgctctgttgcccaggctggaatgcggtggtgcaatcttggctcactgcaccctccacttcctgggttcaagtggttctcctgtcccagcctcccaagtagctgcgactacaggcacacatcaccatgcctgcctaattttttttttttttttgtatttttagtagagatggggttttcccatgttgaccaagctggccttgaactcctgacctcaggtgatctgaccacctcggcctctcgaaaggctgggattacaggcatgagccaccatgcccggcccttctgtttctttagtgccaggggattacactgtcctcagctgggacagggcttcctgaaaggagaaggcactccccccaccaacctaagcatccatcctctggccacagcccatcccagctttgcctacatttgcttaatcttctggtttctagggcatgaggaagtagtcatgggatctgttaggccccatctgttagacctggcagggagtcaagctctctgtgatgcttcaatagcagctaatgggaaagtggatagacttaaggatgaacttccattcttgtgtatgtcttagctaaagctagtttttggatgaaggacgagggtgcatgatgctaatccctgggagagcagctgcactccaaatacagtcctaatcctctgtaacagggaacaacgggaacccagatggggtcaggctttatgcaagaggggacatttgtgctggggttttgaagagtaaataggagtttttctcattgttctggcttcctgtgcccagctgtatcaggctccaggctgggcatcggtgtacccagaccctttccctcttcgagggggcacattcctgcccctacccattttgttgccctttgaagcccggccgtgtgtctggtatgtagtggggacgtgtgagggaaggtaagaggtcttgacaagaagccagaggaagctgccacaggaacaacctctctgggtttctgggtgcctaactgtccacagattgaagcagagctgtgaatgccccatgggatgtgaaagggtagagggaaaaaggaaaggtgctcctgtggaggaaatggcataaataaaggtgtgcaggctggaatgagaattcttcccagtttctgtcatttctcttcggagtccttctcttttttctcagttgtttcttgggaagagggtggaaagaacatattcatccatccgttcatccacccatccactcattcatccactcatctatccctccaattatccatccatctacccatccatccatccatttatccatccatccatccatccatccatccatccatccatccatccatctgctcatccattcatccatctgctcatctatccacccatccatccatccatccatccatccatccatccactcctccatccatctgctcatccatttatccatccactcatctatccatccatccatccatccatctgctcatccattcatctatccactcatccatccatccatccatccatccatccatccatccatctgctcatccattcatccatccactcatctatccatccatccatccatccatccatccatctacccatccacccacccatctatccatccatccatccatccatccatccatccatccatccacccacccatccacccacccatccatccatccattcatccattcatccatccactcatctatccatccatcctctcatccatccatccatccatccatccatccatccattcaaccacccactcattcacccactcatccgtccatccactcatccatccatccatccatccatccactcatttatccatctatcagtctatccatccatctacttttccatccatgtatccacccatccacccacccacccattcacctatccacccacccatctatccatggatccatccatccactaatctgtcttttttatttatttgtttatttatttacggcgtctcactctgtcacccaggctggagtgcaggggcatgatctcggctcactgcaacgtctgcttcctaggttcaagcaattctcctgcctcagcctcctgagtagctgggactacaggcacccgccaccacgcccggctaattttatatttttagtagagatggggtttcaccatattggccaggctggtcttgaactcctgaccttgtgatccactcgcctcagccttccaaagtgctgggattacaggtgtgagccatacgcccggcccatccattcatctatctatcatccacctgcccacccacccatccatccatctactcatccatccatccatccatccatccacccatcccatccatccatccactcatccacccgtctactcatctatccattcatctacccatccatccattcattcatccatccatttatctgtttaactatccatccatccatccatccatccatccatccatccatccatccatccatccagcaatgacaaggtctgccaggccctgttcttggtgctggggacagtgggaatagcacacacacacaaaaacccctgttgttgaggagcctgcattctagtgggggaggctgacagtgaagaaataagacaatgtataagtcatcaggaggtggtatgtactgctctggagaaaacaaagtggaacagggtatgaggggggcactttgacgaggagggctagtggtaaggtgacattgcagcagagacctggggaaaattaaggaatgaatcatgtggatctggggaaatggtgttccagacagtggttactgccagtgcaaaggccctgaggtaggagccagtcagtgcctgtatgttcagggcagtgactggcccagctggtgggaatggtgcaggaggtcaggttggatgaatctccaagcggctggtccccttgagatctgaggcccagggagagaatgataccatcatgagaagccacagctatactgagacacccaactctcaattatgaattttgttttttttaaatgagacagagccttgctgtctcccaggatggagtgcagtggcatggtcccaactcactgcagcctccacctcccaggttcaagcaattctcctgcagcagcctcctgagtatctgggattacaggcgcctgccaccacgcctggctaatttctgttgcccaggctggagtacagtggcatgatcttggctcactgcaacctcctcctcccgggttcaagcgattctcctgtctcagcctcctgagtagctggggctacagatgcgtgccaccatgcctggctaatttctgtatttttagtagagacagggtttcagcatgttggccaggctggtctcgaactcctgaccttaagtgacccacatgcctcggcctcccaaagtgttaggattgcaggcgttaagccaccacgcccagacaccactgtgctcttgaagtccaaaatctgggctgcggagatggaacttgaaggccaagagactggagaggaaagaacagatggttggaaagatccaccaggacatgggagctggttagacctaggatgtgggcagctgctggggccaagatgatgttaagttccccagccccagtgaatagtggggagagggtgggacagttagagtagggggtggactggggagtgggttgggtggtggctttggagagccacacctgggttcaaattctggtaccaccacttcctggtttcacctctctgagcttcagtttctccatctgtgaaacatagataaaaatggcaccttttaaggctgggcggtggctcacgcctgtggtcccagctacccgagaggctaagtggggaggatcacttaagcctgggctgcagtgagctgtgatggcaccactgcattccagcctgggcaacagagagagactttgtctcaaaaaacaaaacaaaacaaaacaaaacccaattttgcctgggtgtggtggctcgtgcctgtaatcccagcactttgggaggctgaggtgggagaattgcttgagttcaggaattcaaagcctggtaacatagtgagaccccgtctctactttttttttttttttcttaagagacagagttttgctctgtcagccaggctggagtgcagtggtatgatcacagctcactgcagcctcgaactcctgtactcaagcagtcctcctgcctcagcctcccgagtagctgggactacaggtgtgcaccggcatacctgggtgatttttttgtttgtctgtctgttttctgagacagggtctcaatctgtcacccaagctggagtatagtggtatgatcacagctcactgcagcctcgaactcctgtgctcaagcagtcctcctgcctcagcctcctgagtagctgggactacaggtgtgcaccagcaatacctggctaattttttattttttgtagagatggggttttgctatgatgcccaggctggtcttgaactcctggcctcaagcaattcctcccgccttggctttccaaagtgctgggattacaggcatgagccactgcacccggccagaatagaggttcttatctccatcctcccataacaggaaagatgacacatgccacccactgctctatgcttgctttcctcactaatcaccttggcagtctttccaagtcagtctgtagagattataattattctttataacatgactgcgtattccatttatttcaagaaagacttacattttgctcgccctgtgctagacattagtctaaaccagggaggggcctggctggatgcagtggttcaggcctgtaatcccagcactttgggaggccgaggcgggaggattgcttgggtacaggagttagaggccagcctgggcaacagagtgtgacctcgtctctataaaaatgaaaaataaaactaaaataaagctgggggctgggtgcggtggctcatgcctataatcctagcactttggcttacaggtgtgagccaccgtgcctggcccaattatagcttctaaaaaataataaaaggccgggcacggtgactcacacctgtaattccagcactttgggaggccgaggcgggcggatcacaaggtcaggagatcgagaccatcctggctaacacggtgaaaccccgtctctactaaaaatacaaaaaattagccgggcgtggttgcgggcgcctgtagtcccagctactcgggaggctgaagcaggagaatggcatgaacctgggaggcggagcttgcagtgagccgagatcaggccactgcactccagcctgggcgacagagcaagactctgtcttaaaataataataataataataataataataataataataataataataacctcatccatgaatcattttccagctcctctgctgtgtgatcttgggcacattagtaaacctctctgtttcctggtttctcatctgtaaaatgaggatgctaaatccctatttacagcatcattgtgggggataagtgtattattataaagaacctagaaaagtgtttagctgcatatgcagttgtgtgttgcttaataaaaggaatctgttctgagaaatgcgtagttagatgatttcacagttgtgtgaacatcagagtacatttacataaacctagagggtacagcatactgcacacctgggctatatggtataacctattgctcctagctacaaacccgtacagcatgggactgcactgaatacttaccattgcattaaaagattgccttctccttttctttcttttttcttttttttttttttttgggacggagtctcactctattcctcaggctggagtgcaatgacgtgatctcagctcactggaacctccacctcctgggttcaagagattctcctgcctcagcctcccgagtagctgggattacaggcacgtgccaccacatccggctaatttttttgtatttttagtagagacagggtttcaccatgttgaccaggctggtcttgaactcctgacctcagatgatctgcccgcctcagcctcccaaagtgctgggattacacgtgatagccaccatgcccaggcgatttcttatcatttataccatattttatacaaagatttcttatctttcttttgagacagagtctcactctgtcacccaggctggagtgcattggcacgatctctgctcactgcaacctccacttcttgggttcaagtgatcctcctgcctcagcctcctgagcagctgggactacagatgcacaccaccaagcccaccattttttaaagtagagatgggggtctcaccatgttgcccaggctggtctcaaactcctggcctcaagagaccctcccacctcggcctcccaaagtgctgggatgataatcgtgaatcatcgtgctccacccagtcctcgtgtttttatttttcaaattttaagacgttttattttgtcaaccgaagtgctagccaatctttgtgtttttgatagatattgccaaattgttatccgtctgggattgtttccatatgaattatttcaattataccaccacatgccagaggactggcttctctgccgcctccccgacagacggttctgttgccaagattctggagttttgccagctggatgggaaatcagtggagctcattaaggctcagtttacattttctcttattctgagtgaagctgagcctctttccttatgtttaagagctatttatattttcttcctgtgatacaatctctgttcatatcacttgcttactattgttgcactttctagaactactgaccttttctcttactgattttttttttttttttgaggctgagtctttctctgttgtacaggctgcagtgtagtggcgcaatctcagctcactgcaacctccgcctcccaggttcaagtgattctcgtgcctcagcctcacaagtagctgagattacaggtgtgcgccaagatgcccagctaatttttgtatttttagtagagacagggtttcgccatgttggcctggccggtctcaaactcctgacctcgagtgatccacccgtcttggcctcccaaagtgctgggattacaggcatctcttactgatttttaggagctctttatatataggttgacttaaattgcaagtcaggtatttgctagctttgtggtcttggagaaaaaaataattacttaacctattggatccctgattgtcttatctataaaacaggaaatctataaaatgagaatgttggccgtgcacatggctcactcttgtaatcccagcacttcgggaggctgaggtgggggatcacctgaggtcaggagttcaagaccagcctgtccaacatggcgaaagcccaactctactacaaatacaataattagccgggtgtgctggtgggcacctgtaatcccagctactcaggagactgaggcagaagaatcccttgaacccaggaggcggaggttgtagtgagccaagattgcaccactgcactccagcctaggcaacagagtgagactccatctaaaataaataaataaataaataaataaaaataaaaataaaataaaataaaatggaaatgttgacagtacctttatttcagagttgtgtaaggattaaacatgataaggtaaatgaaattcccagcatggcaattaacatatagtgagtgctaaatgaacgagagtcattatttttgttaatttaattccattgagtcccagctgcctgtaggcaatggtatataagtcagggtacgtatgttaactgctgtaacaaattgcatcattttgccaggcacaatggctcacgcctataatcccaacactttgggaagccaaggcaaggctaatcgcttgaggccaggagtttgagactagcttgggcaacatacaagatccccatctctacaaaatatatatatatattagcagagcatggtggtgtgtgcctatggtcccggctacctaggacgctgaggcaggaggatcacttgagcccaggaattggaggctgcagtgagctatagatcgcgccgctgcagtccagcccgggtgacagagtgagatcctgtctcggaagaaaaaaaaaaaaggccaggtgcagtggctcacgcctgtaatcccagcaccttgggaggccaaggcaggtggatcatgaggtcaggagtttgaaaccagcctgaccaatatggggaaatccggtttctactaaaaatacataaattagccaggcgtggtggtgtatgcctgtagtcccagctactcaggaggctgaggcaggagaatggcttgaacctgggaggtggaggctacagtgagctgagatcatgccactgcactccagcctggtgacagagcgagactccgtctcaaaaaaaacaaaaacaaaaacaaacaaaaccaaaccctcaaaacacaaaaccaaattacatgacttcagtgatagtgagactttacttcttattgatgtcacaattcagtttgggtcaatgtcaggggttgggggaggagggctctatgttatagagtctctctagggccgaggctccatcatctcatggtcttagcttcccgaaggcccttggagtcttttctactggggaaagagcgctatgaaagaatttcccaggccaggcctggaagtggcgccatcacctccatcctttttttttttttttttttttgagacggagttttgcccttttcctccaggctggagtgcaatggcgcgatctctgttcagtgcatcacggcaacctccgcctcccaggttcaagtgattctcctgcctcagcctcccaagtagctgggattacaggcatgcaccatcacacctggctaattttgtaggggtttctccatgttagtcagggtggtctcgaactcctgacctcgggtgatccactcgcctcggcctcccaaagtgctgggattacaggcgtgagccaccatgccctgcctccattcttgttattggccagaacttggtcacatggctccatttaactacgagggagactaggaatgtggttaaactggagctggggataaaaaggagataggttggttggacgcaaagaagtcactgccgtagaacctcagggtaatgcctcactggctccagaaatgcaggtatggagcgggtttcaggaatgcaggtctagggccaggcatggtggctcatgcctgtaatctcagcactttgagaggccgagacaggaggattgcttgaggctaggaattcgagaccagcctgggcaacataccaaggtcccgtctctacaaaaaataaaaaaataagcccggcatggtggtgcacgcctatagtctcagctactcaggaagttgaggcaggaggatcgcttgagcccaggagtttgatgctgcagtgagctatgattgtgctaccactgtactccagactggacaaaagagtaagaccctgtctctaaatatatctatgcaggtctgtggaaatctcaatgggatgtagaataagaaggacctgagccaaggccatgggggaggaattcagctggggatgagggagctgggtgatagcaacttcagcaaaatgggttgggctgattggaaaacctcctcttaccttgcctgctagggccaacaggaggggcatctaggagggtcagcacttggcaccatccctttccattccattctgttccttttttttttttttttttgagacagagtttcactctctctcccaggctggagtgcagtggcacaatcttggctcacggcagcctccgcctcccgggttcaagcgattctcctgcctcagcctcctgagtagctgggattacaggcaagtgccaccacacctagctgatttttgtatttttagtagagacggggtttcaccatgttggccaagctggtctccaactcctggcctcaagtgatctacccgcctcggcctcccaaagtgctgggattacagacgtgagccaccatgcccagcctccattctattctattcactgacctcctctcttggtccagtgctgggaaatgtcacctttcaggactttcacagagatgctagaaatctctgtcccttccctactcacagcccttccctggttccccactgcccttggtgaaaaagacaaaatcctcactgtagcccacaagggcttatgcatttggcctctgtccatctctcagcccttccctgctccctctctacccattgctctctgcaccgcagccaaatcggccacccagcacaatccagcctcagggcctttgcactggctcttccttcttcagggatttctcttccctcaggtatacacggtgagtgttctcttatctccttcaggtttctctttctctctctctctgtcttttttcggagaagggggtcttgctctattgcccaggctggagtgcagtggtgttatcatagctcactgcagcctccaacttctgggctcaagtgatcctctcgcctctgcctcccaaagtgctcggatacagacatgagccacttcacctttttcttttttctttgttttaacggggtctctgtctattgtccaggctggagtgcagtgacatgatctcagctcactgcaacctctgcctcttggattcaagtgattctcctgcctcagcctcccaagtagctgggattacaggcatgtgccaccatgcctggctaatttctgtatttttagtagagacggagtttcaccatgttggccaggctggtctcaaactcctgacttcaggtgatctgcccgcctcagcctttcaaagtgctgggattactgatgtgagccactgcacatggtcagtggccaggtttctttctttctttctttcttttttttttttttttgagatagagtcttgctctatcgcccaggctggagtgcagtggcacgatctcagctcaccgcaacctctgcctcctgggcccaaatgattctcctgcctcagccttccgagtagccaggattatagggacgcaccaccacacccagctaatttttgtatttttagtagagatggggtttcaccatgttggccagctggtcttgaactcatgacttcaagtgatccgcccgtctcggcctcccaaagtgctgggattacaggtaatgagccaccgcgcccagcccagatttcttatctgagagatcttccactgtttctagatataaaatcatagatttcgccctcccaacttcccattctctttcatgttttatttttctccatagcacttagtgctctctgacctgtcatagtttttacttatttgcttattacctgttttccacactcaaatgtcaaggcaaggatttttgtctattttacgtcccccagtgctttagaacaccacctggcacatagtacggaatcaattaatttattcatttatcatatgaatatatgattctaattgcttcattcattcgcttaacacaggggctggcaaatgataactcatgggcccaagctgcctcgtgttttaaaaattatcttagcttgtatctgtagtcccagctacccgggaggctgagatgggaggatcgcttgagcccaggagtttgaggctgcagtgaactatgatcctgccactgcactccagcctgggcaacacagcaagcccgtccctgtaaaataaattaatttaaaaaattaaaaatgaaaattatggctgggtgcagtggctcacgcctgtaatcttaagacattgggaggctgaggcaggaggatcacttgagcccaaaagtttgagatcagcctgggcatcctggcaaaaccccatctctataaaaaatataaaaattacctgggtgtgatggtgtgcgcctatagtcccagctactcaagaggctgaggtggaaggatcacttcagcctgggagatggaggttgcagtgaaccacgattgcaccactgcactctagcctgagcaacagagacagggtctcaaaacaaaatgaaacaaaacaaaataaaaattattttatttatttacttttcttggtattgatttgacgtttactatttttatattttattattattatttttggtattccgcatattcagaaaaacttctctagtaacaatctatataaaaatgatccctgaaagtagagtcttactgccttattttgaaaataaaatttaaccaatacacggtcaggcccatttgttgacacgctgtctatttttttttttttttgagatggagtcttgctctgtcatccaggctggagtgcagtggccttcaggtctggctggatccaggggctcaggcaatatctcaggacacctcctccccacccttggtctttccatctctctctctctattttttgtttgtttgcttttttgtgttttgagacagggtctcactctgtcaccaaggctggagtgcagtggtgcgatcttggctcactgcaacctccatctcttggcctccagtgatcttcccacctcagcctcctgagtagttgggactacaggtgcacaccacaatgccaggctaatttttgtatttttagtagagatggggtttcaccaagttggcaaggctggtcttgaactcctgacctcaagcaatcttccccgccttggcctccaaaaatgctgggattgcaggcgtgagtcaccgcacccagccctccatctcttaactctgctttcttgtgggtgttttcctccatcctcaatcattcttttccctcatggaggcagatgagggtgaccaactactccagatttatttatttatttatttatttatttatttatttatttaaagtctaagttttgctctgtcacacaggctggagtgcaatggcatagtcatagctccctgcagcctcaaacttctgggctcaggagattctcctacctcagcttcccaagtagttgggactaataggtgtgcgtcaccatgcccaactgtttttttaatgttttaaaaacattaaaacacagccagacatggtggctcacacctgtaatcccagcactttgggaggccgaggcaggtggatcacgaggtcaggagatcgagaccatcctggctaacacggtgaaaccccgtctctactaaaaaatacaaaaaattagccgggtgtggtgacgggcacctgtagtcccagctacttgggaggctgaggcaggagaatggcgtgaacctgggaggtggagctggcagtgagccgagatcccgccactgcactccagcctgggtgacagagcaagactccgtctcaaaaacaaacaaacaaacaaaaaaacattaaaacattcaatggagatggacctcactgtgttgctcaggctgatatggaacttctggcctcaaatgatccttctgcctcagcctcccaaagctcttagattacaggaatgagccaccacatccagcctgctctaaatttatattctcatcactctgagttcgatggaaaataggggggttggctttctggtcactgaagccaaggtcctagcattatccttcgttgaacatgattctttttattttattattattattattattattattattattattattttgagactgagtcttgctctgttgcccaggctggagtgcagtggcacaatctcggctcagtgcaacctccacctcctgggttcaagtaattcttgtgcctcagcctccctagtagctgggattacagacaggtaggtgccaccacacctggctaatttttgtatttttagtagagacggggtttcaccagattggccaggctggtcttgaatgacctcacgtgatctgcccacctcggcctccccaagtgctgggattacaggtgtgagccactgcacctggctgtttgaacatgattctttttttgtggaggtgggaggtggctggtcacatgtctatttctgaaccggctgctgtggccaggagaataccatgctctgatgggccaggccagggtcatgtgcctattccttgagttgaggttggggtggcttccacagaggaaactgaggaactgttacctcagaagggtaaataagatgtcaggaggcaatcagtgtttatatgggcagtgacttctaaatttaagccagaatttctgattctcagtcctgttgacatgtggggccggatcattttctgtcctgggagctgccctgtgtattctaaaatgcttagcagtatgcttggactctatccatttcacacaagtagcacctctcctcagtatctccagacattgccaaatgtcccctgggaggcagaatcgccctgggggcgggcaaaccagttttggagggagtgagcttgctgtcttggggaaaatccaaagagatctgatgattactggctgagaacagcaaagaagagattgagggcttctttgaattagaatatttattttaatttctttctttctctctcctttcttcttttttttttttgacagagtctcactctgtcgcccaggctggagtgcagtggcgcgatctcgtctcactgcaagctccacctcccaggttcacgccattctcctgcctcagcctcccgagtagctgggactataggtgcccaccaccatgcccagctaattttttatattttcgtagagatggggtttcaccgtgttagccaggatggtctcaatttcctgacttcatgatccacctgccttggcctcccaaagtgctgggatttcaggcatgagccaccgcacccggctctttcctttcttttctgttctgctttcttttcttttctttccctccttccttccttccttcctttctgatggagtctctctctgtcactcagactggactacagtggtgtgatcttggctcactgcaacctccgcatcatgggttcgagtgattctcctgccttggcctccagagtggctgggtttataggcatgtgccaccatatccggctaatttttgtattttttagtagagaaggggttttgccatcttggccaggctggtctggaactcctgacctcaagtgacctgcctgccttggcctcccaaagtgctggattacaggcatgagccactgcacctggccttattttttatttaatgatggggagaggccagacgtggtggctcatgcctgtaatctcagcaccttgggatgctgaggcgggtggatctccaacatggtgaaaccccatctctactaaaaatacaaaaaaattagccggccatggtggcaggcgcctgtaatcccagctactcgagaggctgaggcagaagaatcacttaagcccaggaggtggaggttgcagtgagctgagatcgtgcaagtgcactccagcctgggtgagagagtgagactctgtctcaaaaataaaataaaataaaataaatgctggggagaggaagaggggaggaagactcatttgatgttattttatcatcagtgataagggctacactgattgctggggttacagcacaggacataatggacacagttaatacttttctgagttcatgccctcttgagggagggggtggtgtttttgttccttgtggcttttgtaacaaagaaccacggatcggatgtcttagaacaaaggacatttattctctcataatcctagaggccagaggtctgaactcaaggtgtctgcagagctgtgctccctctgggggctccaaaggagaatctttctctgcctattcctgcttctgggggctccagatgatccaggacaggcgagcccctagattggggcttagccctggagggttcttggcttcacccaggaaagaattcaagggcaagctggtggtgttagcaagttttattgaagcaaccatgcagagcagcagcagaggtactgttccttgcagagcagggctaccccattggcagtgagcccagagtagcagctcagaggcagtgctgcaggcatatttatcccgttttaattatatgcaaatcaaggggtggattatgcagagatttctagaaataaagtggtaacttctgagttgtcaggtctttgccatggaagggggcatcagcttctgggtgttgccatggcaatggtaaactgacatagcactggtggccatgttttatggagaggcacttttgcctcttccctgtttcagctagtcctcaatctggtccagtgtctgagccccacctccagagtcgagtcctgcctcctatttcacatgcatccttggattgtgactccatctttacatggttttctcctatgtctgtctgtgtgtctcttacaaggacacttgttattggatttagggcccacctggatgatcccagatggcctgggtgggtcttaaatatctcctcatcttgaagtccttgagatacctcctcatcttgaagtccttgagttatctcctcatcttgaggtccttgagatatctcctcatctcgaggtcctcaagctatctcttcatcttgaggtccttgagatacctcctcatcttaaggtccttgagttatttcctcatctcgaggtccttgagataactcctcattttgaggtccttgagatacttcctcatcttgaggtccttgagctagctcctcatctcgaggtccttgagctatctcatctcaaggtccttgagctagctccttatcctggggtccttgagctacctcctcgtctcaaggtccttgagatatctcctcattttgaggtccttgagctatgtcctcatctcaaggtccctgagacatcgccccatctcaagatccttaccttacatcttacaaagtcgttttctccaaaaaatgttcacaggtcaccttcacagcttccagggatttgacctggatacatctttagagggggccagacccattccagacagtaaacaaatagacaaaacgctggcacattgtaataaatgtcacagatgaaacaaacccagggatcaaggggaagaagaagaggagggcatgctttctggagggtggtcaaggaaagctgagagctgcaggaggaggagccagctctgggaagcatgaggcagagagggcaaagactgtgcaaatgccctaaggtgagaagaatcagaatgaaggagcttctggaaggaagggagtgagtggagggagagtggtaaagaatgaggtttgggaggaaggtacttacctagaatggctatggggatgtgtgtggaacttaagggggggatgggaaatccttggagcatttaagcagatcaattgtttaaagaggtccctgaccaggtgtggtggctcatgcctgcaatcccagtgttttgggaggttgaggcaggaagatcacttgaggccaagggtttgaaaccatcctgggcaacatagtgagatcccacctctacaaaaaacaaaaaaagaagagagatctggaaaaagaaggttgatgaaggcatccccatgagaagtgatggtggcctcgactgggagttgggagtcatggatccagctcacattttcattgaggaggaagggtggaggtggatgaaaagaggaggcaggtctcatattccaggaaggcaagaattaaaaaaaaaaaggaatgaaatgaaatgaaaagaggaggcagggtggtgtctaggtttacagcttagggacttgcgtgaattagggtatcttctactgtagtaggaagactaggggaggaacaggtcttggggagtttgatcaagcaagggaaggaaggcagtacagcataatggctagcacatggttcttttttctgttttgttttgttttgtttgtttttgtagagacagggtctcactatgttgcccaggctgctcttgacatcctgggctcaggtgatcctcccatcccagcctcagtgctgggattacagggcatgagctaccatgcatgtccggtgcatggttcttaactaaggggtggtgtggggcagcagtgggggcgaggggagtgactctgtcctcccaggggacatttggcaatgcctggagacagtttcagttatcactactggagggcttggtgtgttattgatatctattggatagaggccagagatgcttctgagtgtcttccaatgcccaggacaggcccctctcccaccaaatgtcaacagcgctgagaccgagggactcagtgctaggcacatggactccagttgtgtggggggtccaggttccagtcacagctgtgggatcttgggcaagttatcaaatgcttcaagaaaggaccatatatatggccgggcgcggtggctcacacctgtaatcccagcactttgggaggccgaggcaggtggatcacaaggtcaggagatcaagaccatcctggctaacacggtgaaacctcatctctactaaaaatacaaaaaattagccaggcatggtggcgggtgcctgtagtcccagctactccggaggctgaggcaggagaatggtgcgaacctgggaggcggagcttgcagtgagccgagatcgcgccactgcactccagcctgggtgacagagcgagactccatctcaaaaagaaagaaagaaagaaagaaaggaccatatatcaaaaatgaccccaaaagcagagggagccaagacaccaaagaatgcagcagacaaatcctgtttgttggtaaagggtgatttgttgggggagcttatggagagaagaaacatggtcttgggcggcggcaagacaggtacctctctgcaccattacctcacagacccagtgcttatatagtacaggaaaatgtgcaggacccagtgcttatatagtacaggaaaaggcagtcctccagaacaggcaaaaacaccgtgcacatcacagcctataatttgtatgataacatcaagtttgctttgatatgttcttacactagggacagcaaataatgtagaactcaggagacattcccgggagtggggttaatcagaagtcaacatggcaattagcatccaagatggggccactttgtcttcacacagaacctctctgtgactcagtttccctatctttcaaatggagataaaactagtccctaccttataggattgttgtaagaattaaaaatgaggtaataattgtaaagtcgtaaagtgcttcaagcagtatccattaaatgattgataaataaatcattggtaaatgatttaccagtgatactgataaatgacttctttatcatttatgaaaaattgataaatgatttatttaccaataaaccaacggtaaatgatttatttaccaataaaccaacggtaaatgatttatttaccaataaaccaacggtaaatgatttatttaccaataaatcaacggtaaatgatttatttaccaagggtaaatgtcactcattgataaatgacttattggtaataaatcaattattagtttattggtttattggtaataaatcatttatcaatgagtgaaatcatttgggacaaagaagagagagggaaaagaggtggtctgagggttgggccttaggttgtaacagcatagaaacattggggagaggagaatacagtgactgaagaggaaaaccaggccaggcgtggtggcccatgcctgtaatttcagcattctgggaggctgaggcaggaggattgcttgagcccaggagtttgaggctgcagtgagctatgattgcatcactgcgctcaggcctgggcgacacaatgagattctgtctcaaaacaaaacaaaaaaacaaagaggataaccagatgggtgtggtgtcaagagaccaatgccgttgagaggagtagattcagaaagtgtcatgaatagcaacaaaagcaataggtcactttaatgagcacccactatgttcaggtgttgttctaggtactttatacttattaacacttttgaattttcacaacaaatccatggtgttggcaccatcatatatttaggttattagttattgctgtgaaacaaaccactccaaactgagtgatgtaagaaaaacatgatttttgattctcacagattctatgactcaggaattcagacagggcatagtgatgatggtgcctcagctccatggtgagaaactttgactttctgggaactagaatgctctggaggattcttcgtcacatgatgggtgtctgggctgggatgacttgaggctatgctcagttggggctattgactggagcacttacgtgtggtatctccaagtggcttgggcttccccacaacatggcgaccgggtttcaagaaacccggagagagagcaagtattcctcaaaaagatcaagccagaagctgcaaggcgtcttctaacctacttggaaatcacgcagtgtcacttacagcagttttcgtaacaagaagccataccctggcttctctcttcctaccctaggcaccagcagggacctccaattggctgaacctatctaggagcagggtgcaaaggagcctgggaaatgtagttgtcttcctggcagcgcaaaacaaaggaaggggatgagtcattaaccaatcaggttaatgacctacatgaaccttgagcaaatgaccctccttctctgaactctgtgtatcgctcgcgaaataggagccctacttcattgcaggatcgttttgaagaccagaggagacagttgtaatgcacacgaattgcttcacccagggcgtagttcttttatttatttatttatttatttattgaattaattttatttataactctaatgggtaagcagcctggttctcaattgatgggagctgtcaatattgctattggtctgagaactgatgatacgtaacggtttactatgtcctggcacagggtggcacgtcttagctctactggtcctgctggttttggggtttagtccactctttttgcttgtttgtttgtttgtttgttttttgagatggagtctcactctgtcgcccaggctggagtgcagtggtgcgatctcagctcactgcaacctccgcctcctgggttcaagtgattctcctgtctcagcctcccgagcagctgggactacaggcgcgtgccaccgcgcccagctaatttttgttatttttagtagagacagggtttcaccatattggccaggctggtctcaaactcctgacctcgtgatccgcccgtctcagcctcccaaagtgctgggattccaggggtgagccaccgcacccggctagtccactctgagatcaagcctagatatcctttcttgtgaccgtctctgccatgagctaccaggacatgacgaatctgccttccttcttgctgcctgttagagatataccctggtgatctaatcacctcttaaaggtcccgcttctcaacaccattgcattggggattatacgttcccaacatgtgcacattcaaaccatagcagcgtttaagcactccaaggatatgggtctactgccttcagcctgacttgctattgagtgtgtactcgagagagaggtgggagaaatacttcaaaggcttcaaaatcatttatttgtccttctttatagggaccccgggagatatggcagaatatggggtgcttggggtgacagccacttgctgcattttgattacatggccacggtttgggcatatcggcacctgagaccacccttggttcactcccttcctccctccccctcgcttactctgctccaggcacacagatctcctggctccaacatgccagggcctcagggcctttgcactggctgttccctctgcctgaaatgcttttttctcagagcctttgcactaacctcagggcttcttgtactaacctcactggctattccctctgcctgaaatgcttttcctccagacacccacctggattgtcccctcacctccttcaaacctttactgaaatgccactctctcaatgaggcttcctggacttccctatttaaaattgcaccccctcctgacattctccattccttttcctacttatttttttctcgcttaacacttaccaccttcagacaagctatgtaatatactcctacaataccttcattgtcttcctttgccagaatatcagccccttgagggcagagatgcttatctctttggttcatagctgtatctccagcacctagaccagtactgggtgtatagtaggtgctcaataaatatttgcatatttggccaggcacggtggctcacatctgtaattccagcactttgggaggccgagacgggtggatcacttgaggtcaggagaccagcccagccaacgtgacaaaaccctgtctccactaaaaatacaaaaattagccaggcatggtggcaggtgcctataatcccagctgctcaggaggctgaggcaggagaatcacttgaactcaagaggcggagattgctgtgagccgagattgcagcactgcactccagactgggtgacagagtgagactcagtatcaaaaaaaaaaaaaaaaaaattgcatagtgaatgaaggagtgtctgaatgatcaaagccctctcacctgctactccctttgcttggagcctttttacccccttcacactctaaagtaagaatagtttgaattacaaagaatacaaatttatctctcattcactatgttttatcaagagtaggagcaaaatggccgggcacagtggctcatgcctgtaatcccagcattttgggaggccaaggcgggcggatcatctgaggttgggagttcgagactcagcctcaccagtatagtaaaacccagtctctactaaaactgcaaaattagctgggcgtggtgacgcatgcctgtaatcccagctactcaggaggctgaggcaggagaattgtttgaaccccgggggcagaggttgttgtgagccgagatcgtgccattgcactccagcctgggcaacaagagtgaaagatcgcgccattgcactccagcctgggcaacaagagtgaaactccgtctaaaaaaaaaaaaaaaaaaagagtaggagcaaaaatatgactaagactgtattttgcattattgaccaatgatggtttacattatttccttattttccaccccatcctcccccacccactccctaagctgatagtcatcctatgcacctagttttaggggaaagacacagcagggcagccagtatcctgctgacttaaaaaaaaaaaaaccagctatattgacatacagtaaattacatatttaaaatacattggtggggcgcggtggctcacgctgtaatcccagcactttgggaggccgaggtgggcaaatcacttgaggccaggagttcaagaccagcctagccaacatggtgagaccctgtctgtactaaaaatacagaaattagccaggcatggtggcacgcacctataatcccagctactcaggaggtggaggcaggagaatcgcttgaacctgggaggcggaggttgcagtgagcggagatcgcatcattgcactccagcctgggcaacagagtgagactctgtctcaaaaaaaaatatatgatttggtaaacaattttttctttaatttctagatttgttttcagaaacggtcttggcagggcatggtgcctgaagcctgtaatctcgcccctttgggaagctggtgtgggaggattgcttgagtttaggagatcgagatcagcctgggcaacatggtgagaccagcctcatctctaataaataataaataaataaataaataaataaaataattagctggtcatagtggcatgtgcctgtagtcccagctacttgggaggctgagatgggaggatcatttgaacccaggaagtcgaggctgcagtgagccaggattgcaccactgcactccagtctgggtgacagagtgagaccctgtttctccccttcccccccccacccaaaagaagggggaaaaaagaaagaatcagggtctccctatgttgcccagactggccttgaactcctggactcaagcgatcctcctaccctagcctcctgagtagctgggattacaggtgtgtgccactgaacctggcctgatttgataaattttgacatatgtgtgcaactatgaacccagccttgaaatcaatggatcatatccattgcccctcaaagtttcctccatcccacccctccctgcctccccctcctcccacctctcattccctcgtacctcctgatttgctgttagtcactgtcgattagtttgtatttcctggagttttatgtaagtggaatggtaccatctgtggtcttctgtgactggctgctttccctgagcatgatgtcctggttcatccatgttgttgtatgtatcagtgtaccattctgttgtacggatgcaccccagtttgtttatccattcatcccttgatggaggtttttttgtttgtttcgctttgtttttttgagatggagtctcgctctgtcgcccaggctggagtgcagtggcgcaatctcggctcactgcaacctccgcctcccaggttcaagcgattcttctgcctcagcctctcgaacagctgggactacaggtgtgcgccaccacgcctggctaatttttttgtatttttagtaaagacagggtttcaccatgttgaccaggctggtctcgaactcctgacctcataatctgcccacctcggcctcccaaagtgctgggattacaggcgtgagccaccatgcccggcctatactttaagttctgggatacatgtgcagaacgtgcaggtttgttacataggtatacacgtgccatggtggtttgctgcatccatcaacccatcatctacattaggtatttctccgaatgctatccctctcctaacccccagcccccgacaggccccagtgtgtgatgttccccttggttgaggtttgaattactgatggcacttttggctatcatgaatcaagttgctagctggatatggtggcacatgcctgtagtcctaactctttggaaggctgaggcaggaggattgcttgagcccaggaatttgagactgcagtgagctgtgattgggccaggctgcactccagcctgggtgacagactgagactgtctcaaaaaaaaaaaaaaaaaaaaaaggaaagaaaagaaaacagaatcaagctgctatgaacattctgtacaagtctttgtatggacatgtgctttcatttctcttgagtaaatgcctggtaatggaatatatcgtatgataggtgcatgcttaatgttttaagaaaacttaccaggccagtcacggcggctcatgcctgtcattccagcactttggggaactgaggcgggaggattgctggagcctaggagtttgagaccaacctgaccgacatagtgaggctctgtttcttaatttttttttttaataagaagaaaatgtaccaacttttcttcctttgtgctggaattgcaaggtaaaaaaataatagtaataacaaggaaaacgtaccaacttttccaaagtggatctgccatgtgatgttcctgccagctgctcagcatgcttctcttctttgcttcactatctgtctcattttttttttttgagatggggtcttgctctgttgcccaggctggagtgcagtggcatgatctcggctcactgcaacctctgcctcctgggttcaagcgattctccttcctctgctttccaagtagctgggactacaggcgtgttccaccacacccagctaattttgtatttttagcagagacaggtttcactatatgttggccaggcgcgtctcaaactcctgacctcaagtgatcaacccacctcagcgtcccaaagtgctgggattacaggcatgagccaccacacccagcttcttttttttgttttgttttgttttttgtttttttgagacatcctcggtctgttgcccaggctgtgcagtggcgtgatctcggctcactgccacctccgcctcctgggttcaagcgattctcctgcctcagcctccagagtagctgggattacaggcgcctgtcaccacgcctggcaaatttttgtgtgtgtgtgtgtgtgcagtcggggtttcaccatgttgcccaggctggtcttgaacccctgacctcaagtgatccgcccgcctcagcctcccaaagtgctgggattacaggcgtgagccaccgcacccagccgctcaccatctctttgtcgcctgcatggcaccattctctcctgtaccaccccaaagccttaccaggtgcctcctgcatttaaccaggtcccatagctctctgtgcttcccggcacaccctctcaccaccctcatcatcaattattcaccttgctgactgcttagtgtttgtctcctggctggattacataagccctgtaagggcagagctctgtttgtcttgatcaccattaggttctggtgcttggcatacagtaggcattccacacatgcttgctgaattaatgcatgaccgggtctggggtgctgggtttcacaccaggctctaccgcaaacattgggtcaagtattttcattcccgacgtacagatgagtcaattgaatcaacggaaagcaaaatgatcccatccaagctccctcaacttgccgggctggtctgggagtcgaaccagatctgcctgaccctcccaccggtgctgaaaagtggagtgtgtgctggggtggtaggggatggggcagaagagagacgggcttcctcacagaagggtttgagggctaggatgaggcgtgcacactctgcacccctgcttcggagctttgaaagggtgcacagcacacccgccctctctgggaaccctcgggagcttgaggttgcctgatgaaggggctgatgggttgaacgcaaagggcccctccacccacccttttttctatctccccaaccaagccctggtaacaggcatttccggtttccggccggctccctggtgctggggtgggggtggggagttgattgctgccgtcgtgcttggctctgggtccccttctcccagaccccagaggcctctgtccctgcacactgcttccccgaaggagcgtggaaagccagccgacctttctggctctttcttcatcttgggcaggggttttgttgatgggaggctggctggcaaatggggaagaatgaacctcagggttcaccgcagtgcgcctgggtgctgatttgcatatgggcacgatgccagcacagtgggtgcccgcctcttcctggaggaaggaagaggggcactgaggggggttgcccccagcagggaggaaccgtcctcataatgcctctcctacgtttgtttaaaggaccatcattctcagcaaactatagcaaggacaaaaaaccaaacaccgcatgttctcacttataggtgggaattgaacaatgagaacacatgggcacaggaaggggaacatcacacacaggggactgttgtggggtcggggaagtggggagggataacattaggagatatacctaatgctaaatgaggagttaatgggtgcagcacaccaacatgacacatgtatacatatgtaacaaacctgcacgttgtgcacatgtaccctaaaatttaaagtataataataataaaattaaaaaaaataaaggacctcctgtcctttgccactttctcacactcttcaggcgaccaggaagtcctttctggtggtctaactgcagtcactgctgctgtctgatggagcccctttctttagctggccccaccgcagcccggagaggggatgaatcatgccccctttcccctctttgaggcatcacatgactggaaggaagctgtctccgggttcagctgatctccctgaggtcaggagggaacttcctccctcgagccacagacacagccatctgctctattgtctctggtgatctgcctgcccatgagcgccctcattatgccactctctaagaggcaccaggagcagcttagtgtggttcaaagaggcagtgttgtacagaggttagaggcacagactttgggatccagtgctggtatctggttctccattcctatctgtgtggtccgggatgggcagtatcccctctctgagcctcagttgtttcctctgtcaaagggagatttattcattcgacagattttattgagcatctactatgtgtcagacatggtactaggtattgaggtcctctatttacccaaaggagttgaacatttatgtccacacaaaaacttacactcaagtctttgtagcggctttattcatgattgctgaaactgggaggcaacaaattgtccttcggtagatgaatgcgatgtagggcaaggcaagccctaaattggggctcagcctgggacggttctttgttttgcccaggaaagaattccagggcgagctggaggtgttagacagtagcttttactgaagtgaaagtgcatagcggcagttgcagaagtcctgctcctcgcagagcagggctaccccacaggctgtgagcccggagtaatcagggttgcagtcatctttgtacccactttaattatatgcaaattaaagggcagattatgcaaatttctaggaaaagggtggtaacttctgggttgtcgggtcattgccttgggaaaggagtagtagctgctggtgttaccatcacaatggcaaactgccatggcacactggtgggcatgtcttatggaaaggtgcttctgctccagccctgttttagctagtcctcaatttggtccgttgtctgagccccacctccagagtcaagttccacctacttcctcgtatggataaataagctgtggtgcatccagacaatggaatattattattattattagagatggacttttgcccttgttgtccaggctagagtgcaatggtgtggtctcggctcactgcaacctctgcttcccaggtccaagctgttctcctgcctcagcctcctgagtagctgggtttactggcacctgccaccacacctggctaatttttgtatttttagtagagatgggatttcaccatgttggccaggctggcctcaaactcctgacctcaggtgatccagccacgtcggcctcccaaagtgctgagattacaggtgtgagccactgctcccagcgcagacaatggaatattattcagcactgaagagagatgagatgagctctcaagccatgaagagacacgcaggaaccccaaatgcatattactaagtgaaagaagccagtcccaaaaggctacatactatatgataccagctatgtgatgtttcagaaaaggcaaaactgtagaagcagtaaaaagatcagtagttgtcagaggttagtggaaagggggtatggataggcagagcatggaagctttccacggcagtgaaaatactctctatgacactataatagtggatacccatcatcatacatgtgtccaaatccagagaatgtgacgcacggcaggcaagccccaaagtggggcttagcctgtgaggcttcttggtttcacccaagaagcctcacaggctaaggaaagaattcaagggtgattccagtggtagggtagacgaaaacagctttattgccgtggcagtgttacagctccatgactgctcttgcagggctaccccacaggctgagagtagcagctcagggcagtttggcggtcctatttatatttatttatttatttatttagagacagagtcttgctctgtcgcccaggctggagtgcagtagtgcaatctcagctcattgcaacctctgcctcccaggttcaagcaattctcctgcctcacccttctgagtagctgggattacaggcgcgtgccaccacgcctgactaacttttgtatttttagtagagatgaggtttcgccatgttggccaggctggtctcaaatttccgacctcaggtgttctgcctgccttggcctcccaaagtgctgggattacaggcatgaaccactgtgcccttcccatacctccttttttttttttttttgagacggagtcttgctctgtcgcacaggctggagtgcagtggcgcaatcttggctcactgcaagctctgcctcccacgttcacgccattctcctgcttcagcctcccaagtagctgggactacaggcgcccgccaccatgcccggctaattttttgtatttttagtagagatgagttttcaccatgttagccaggatggtctcgattgcctgaccttcctgaggcgtgaaccacccgcctcagcctccctaagtgctgggattacaggtgtgagccaccgccccccggcccatacctccttttaattacatgtagagtaaggggcagtttatgcagaaatttccagggaaggggtagtaacttttgggtgatcaggtaattgccatgaaaagcggtggtaaggccgggcgcagcggttcatgcctgtaatcccagcactttgggaggccgaggcggatggatcacctacagtcaggagttcgagaccagcctggccaacatggtgaaaccccgtctctactaaaaatacaaaaattagctgggtatggtggcacacacctgtgatcccagctactcaggaggctgaggcaggagcatcgcttgaacccgggaggtggaggttgcagcgagttgagatcataatactgcactctagcctgggccacagagcaagactccatctcaaacaaaacaaaacaaaacaaaaacaaagaaaatagaccagttgtggtggctcacatctgtaatcccaggaccttaggaggctgaggcaggaggatcacttgagcccaggggttcgagaccagcctgggcaacatagtgagaccctcatttctacagatacacacacacacacacacacacacacacacatacacgcacacacacatgagttggggggatggtttcaggatgaatcaaccacattacatttattgttcactttatttctattattattacattgtaatatataatgaaataattatacagctcacacatatgtgtatatatatatgcacacacactatatgaatattatatatagtaatatttattcatttatatgaataaaaaagaaactaaaagagaggaggaaaggaaggaaggaagaaggaaggaaggaagatcagcctggagtctctggactgccctgatggaagtgtcttggatgctaaaggggtttatgggctgattccctcaacttcctcccgtctaacaaggtctggtgttccatcaaggcagtggctatgctcccaagaagtttgcaaatgacagaaaacctaattacaggtcaacaaaccatgacctgtgggccaaatgcagcctgccacctgtttttgtaaatgaagctcttttttttgagatggagtctcactctgtcacccagcctggagtacagtggcacgatctcggctcactgcaacctccgccacccgggttcaagcaattctcctgcttcagcctcccgagtagctgggattacaggtgcattccaccacgcccagctaatttttgtatttttagtagaaacggggtttcaccatgttggtctggctggtctcgaactcctgaccttgtgattcacccgccatgggctcccaaagtgctgggattccaggcgtgagccaccatgcacggccaacaattttttttaatgaaaataattttttctcaatgccgttttggaagagaagcaaactcgtatgtgggttttaagtatggcttcattcagtagctccaacaatgtcatcaaggactgcatgtctctgtgatggattccttttctggctttgtaaatctaggatctcccactcatggcagcaaagtagctgcagttgctccagaccgcctaacctcactcttgaccaacacagcggagagtaaatcactgtcccagaagctggagcttaagatccgggatttgcactctctcattggtctgaagtgggtcatgtgttaatctctgaaccaatagtcataggcaaggggatgggccatgctaattgactggaactgggggtggagcccctctcagcccatgttgctagaagagaaagaggaaagggtatggatgtgtgcataattagttaatgaatatattcattctttccaccatccctcattgatttgtctactgcgtcccagcagcagggaatgtgatggttgataagaacttgtttctgctctcatggtgatcccagtctactgggattccacgatctgttcagacaggtacaacctgttgtaatcaatgctgtgtattcattaggatagaggtttggctactgtaacagttaggtagagattaatttatcatctaaacctatagagcagcagtctccaacctttttggtagcagtgaccggttttgtggaagacaatttttccatggaccagagttaggggggatggtttcaggatgattcaaatgcgttacatttattgttccctttatttctattattattacattgtaacatataatgaaataagtatacaactcaccataatgtagaatcagtgggagccctgagcttgttttcctgcaactagatgatcccatctgggggtgatgggagacagtggcagatcatcaggcaccagattcccgataaggagcgcacaaggtagatccctcacatgtggagttcacagtagggtttgcactcctatgaggatctaacgctgcagctgatctgacaggaggtggggctcaggtggtaatgcgagcaatggggagtggttgtaaatacagatgaagctatgctagctcacctgcccaccactcacctcctgatgtgtggcccagttcctaacagaccatggaccggtaccaggaggcttgtactgggagctactctggaggctgaggtgggaggatcacttgagcccaggaggtggaggctgcagtgagctgtaatcatgccactgcactcaactgggcaacagagtgagaccctgtcttttaaaaaaaagttaaaatcactcctgtaatcccagcactttgggaggccaaggtgggcagatcatgaggtcaggagttcgagactagtctgaccaagatggtgaaaccccatctctactaaaaatacaaaaattagctgggcttggtggcacacacctgtaatcccagctactcaggaggctgagcaggagaatcgcttgaacctgggagccagaggttgcagtgagtcgagattctgccactgcactccatcctgggtgacagagtgagactctgtctcaaaaaaaaaaaaaaaaaaagaaaagaaaaagttaaaaaaaaggccgggcgcggtggctcaagcctataatcccagcactttgggaggccgaggcaggtggattgcctgaggtcaggagtttgagaccagccttgccagcatggtgaaacccgtctctactaaaaatacaaaaattagccaggtgtggtggcaggtgcctgtaatcccagctactcgagaggctgaaggaggagaatcgcttgaacccaggaggcggagtttgcagtgagccaagatcacaccattgcactccagcctgggagacaagagtgagacttcatctcaaaaaaaaaagttcaaaaaaaccccaaccaattctctcctccccaataattaccttaggacaacaggcataagcttgggtcatccttggcaaactaggaggtaagtcactctatgtagcagagaaccaaagtaacaaggacttaaataaaactgaagattatttatttcttatgcaataatctgagcttaatcagtccaaggctggcatggtcctttctacaatgtcaaagaccagctcctcctgttctgttcttccgccacctgtgaatttcctttgtcctcagtttccaagaatactcatcaccatactcacttgccagccagataaaggggctagaatgttcctccctttaagaatgcaacctggaattgcacattatcagttagcttttgctgtgtaacaaacagtcccctaaaatggaatggcttaaagacaatatttgttattccaattaatttagtaaattgtctgggcagataggtgatctctgtggttagctaataacttggctggggtaggtagtctaggagggcctcattcacatatctgctggttggccagttgattagtataggatacctttagctaggtgcttgtctctgctccacacggtctctcatcctctggcaatttagcctgagtgcttgaatttggcaggagtattccaagaaagcaacaggagaagttgcaaagcctctatgggctaaagcgagccacaagaccaacccagatacaaaagatgaagacttagaatctacctctctttttttttttttttttttttgagatagggtcttgtcttgtcgcccaagctggggtgcagtgacttgatcttagctcactgcaacctcaaactcctggactcaattgatcctcagcctcctgagtagctggaactataggcatgtgccaccacacctggctaattttaaattcatttgtagagacggggtcttgctttgttgccaggctggtcttgaactcctggcctcaagcaattctcccaccccacccaatcctcccaatcatgtcttggggttacaggcatgagccaccatacccggcaattctctttggctggtaggagctggaaagtatttgtaatctaccacaaagggcattcagggcagaggcaaccttatatatgagacctggagatgagagacagtaaaataggtgcatttagcgtgtggcaaccacttccacctggctggagcagaggtgggagaggtaagtgagaaaaaaaagagtagagtcatcagagaagtcagcaggggccgtggtgaggttgaactttgtgttggggatgatgggggaaccatggcaaggtttcaagaggagattgacatggttagatttgctgtatgaaggtgggctgggaggagtacaaaacggatcaggaagaccactgaggaggctgttgcagccacaaaggtgatcactgcggtggctgctctaggatttgggaacagggatggtgagaagagcttagatgtgacagatagtttggatgtagaatctgaataatctattgattgactggaaatggaggattcaatgaatcctccatttccagccaggtgcagtggctcatgcctgtaataccagcactttgggaagccaagacaagctaattgtttgaggccaggagttcaaaaccagcctggacaatgtaacaagaccctgtatctacaaaaaataaaaataaaaataacgttatctgggcatggtggtgcatgcctgtagtcccaacactcaggaggttgaggcaagaggatcaattgaacccaaaaggtggaggctgcagtgagctatgattgtgccacttcactccagtctgggtgacagagcaagacctcatctctacaaataaaaagttagccaggtgtggtggtgcatgcccatagtcccagctgctcaggaggctgaggcaggaagattgcttgagcccaatttcaaggctgcagattgcactactgcacttcagcctgggcaacagagtgagaccctgtctctaaagaaataaaaataaaaataaacccgactttcaaaacacttagattcgttcctggcttgtagacgatcacctatgaaattactctaacttggccgggcacagtggttcatgcctttaatcccagcactttgagaggcagaggtgggtggatcccctgaggtcaggagttcgagaccagcctggcctacatggtgaaaccctgcctctactaaaaatacaaaaaattagccaggcgtggtggcgggcgcctgtaatcgcagctactcaggaggctgaggctggagaattgcttgaacccaggaggcggaggttgcagtgagctgagatcacgtcattgcactctggcctgggcgacaagagtgaaacgttatctcaaaaaaaaaaaattactctaagttgattctgaaggattggggagtgttgaaaatcatcttgggttcctaagacaaattgctgggtggtaatggcaccattgttagatgaagaggctggagggagagcaagtttgaactggcaatgatgtcaatcttggacctgttaagtttgaggtgcccattgttgaaagaatgaacctgtttccccagctgtaagcaaagaaatggattgcaatgaaaaggcatgctttcaactgttgttccaaaacctttgtcctcatctggaacggaggtacagactgtctcttagttactgtgttattcatttctatttatttatttatttttgagatggcgtcttgctctgttgcccaggctggagtgcagtggcacgatctcagctcactgcagcctccgccttccaggttcaagtgatcctcctgcctcagcttctcaagtagctgggattacaggcatgcaccaccatgcccggctaatttttgtatttttagtagagacagcatttcaccatgtcggccaggctggtctcgaactcctgacttcaagtgatccaccctcttcggcctcccatagtgctgggattataagcatcagcctccacacccagcctcatttatttattcaataaattgtattgggcactattgcatgccaccatgtggtgttcaggattcagaggtgactcaaccctgggtcctgacttcatctggagagagcccagcacaggcgtcttcgttgtcaggcctgggttgaggagggacatcatgttaagggaggctgcagttgggggagaatgaggactctgcttggctgaagacattggggaaggtttcctggaagaagagatattggagatgggccttgaaggatgagtaggagttcaccaggcaaataggagaggaacttttagcccagacagcagtcctttattcatctccctgcatataattactgtaagaatcggcaagagaagctggaatggagatccatgaggtctctgaggatcagacagacacatcacagctaactctggcccaaagggtacttcattaggataacaccagctactgtaacaaacaagacatttcagtgacttcacatggtaaaaattgatttcttgtacacaaaacagtacaatgcatgtgcttctagttccaggtcggggggcttttccccgcagataattcagggacccaggctactttcatttgcagttttgccatcccttagagtctcagcctgcagaaaatagggagagaggaggtatggagaagtaatttctccttaaatacagtgccctgaaagtgatgcttatgacaaatgctcctattctattggccagaagcagtcacatgactgcatccacatgcaaggagagatgggaaatgcagtccttagctgggcagccattttccagcagcaattccatattatggaagagaaaacacgaatattggtggatctttagtggcctctgcccgaggtagacagcaggaatagaactaagggcttggaggcagtaacactcagtttgatttgtgctcttgagtaaacccttcttctcactctttgggtttctctctctgagtgatgagtgaagattggaagctgattaatatctgaggtattttccagtttcaaaaattgaccgggtgcagtggttcacacctgtgatcccagcactttgggaggccaaggcaggcagattacttgaggtaaggagttcaagaccagcctggccaacatggtgaaaccctgtctctactaaaaagaaaatacaaaaattagcagggcatggtggtgggcgcctgtaatcccagctgttcgagaggctgaggcacttgaacctgggaggtggaggttgcagtgagccaagatcacgccactgcactccagcctggatgacagagggagactctatctcaaaacaaaaacagaaacaaagacaacccaaaatacaaaaattgatgggttggtgaatgctcttggtttcccagctggagctaagatgatgatggtggtgatgctcatggtcatgaatactattgtggtaatgatggtggtgatgattataatggtaacgatgatggtgatggtggtgataatgatgatgatgatgatgatgataagaatggtgatgaggagaatggtgatggtggtgatgatgatattactatcataatgataatgataatttccagaacttgaaacgtccagccctttttatgcatcatataactgaattacaacaacatgacacagtaggcataaacccttcatgttggttcatttgcctttatccttgttacctatttattgctaagtaacaaattatccccaaacttaattgtataaaacaaccatttattatgcttatggattatttgggtcaagaattctgaaatagctcatctaggcagttcccctttagggtttctaatgaggttgcacacagatgtcggctggggctgcagtcatctaaaggccttagctggagggtctacttcctgagtggctgggccacatagagcttcagctcctctccacctggggctccccacaggactgattgagtggcctcacaacatggtcgccggtgagtggtccaagagaccaaaatggagcttcgatatgtttcattatttagtcttgagaactcacatcttgtttcttccaccctgttcttttagtgacacatggccagtcttggttcaatgtgggaggggattacaaaaaggcatcttaacttatgtatgaatactaggagctatggaccattgggggccatcctggaggctggctactacaaacacattgtcttaattactgtagatttatggtgtcttaatatttggtaggactcataccctttattttccctctgtaggagtatattggctactcatggctgaggttttctatacaaatcttaggatttgtatgtcaagttcaatgaaaagccattctggggtttttaattgaaattggattaaatctatagctcaattttggagagaattgaagattttaaaacttgagtcttggggctgggtgcggtggctcatacctgtaatctcagcactttgagagcctgtggtgggagagtcacttgaggccaggagttgaagaccagcctgtgtgacatagtgacatcctgtctctataaaaaatctttaaaaaaaaattagccaggtatgatggcatatgcttgtagtcccagctacttgggagactgacgcaggaggatcttttgagcccaagaggtcaaggttacagtgaactatgatcgtgccactccactccggcctgggtgacagagtgataccctgtctctaaaaataaatcaatgaatgaataaataaaataaaacaaaacactgagtcttgctagaaaggaactggtatatattctattttgtttaggtcactagctttatgcagttttgtttcacatcttctaggctatggtcaatagtatccttttaaaatcaaagtctgatttccctatgtgaaaagctaaattcttcattttatcattcaatcagttctagcaactgtggacacttgtgcaatccacacccttatcaaaacagaacatttccatcacttgtggcctctctgagtcaatctctaccttccctcttgctccggaagcaaccactgatttgatttctatcatcataggttagttttgcttactgtaggatttcacaattttttttttaatttgtgagttatttttgcttatgtactgacacttagtacactttgtatactggttttgtattcagccacactgccaaataattttattaatttcagctatttatctatatattctttgggaatttctatgttgatgattgcttcttctgcaaaaatgactttctttctttctttcttttctttctctccttccttccttccttccttccttccttccttcctttctttctttctttctttctttctttctttctttctttctttctttctttctttctttcctttttccctctgtcttgtcttgcagtacaggctgagatcttcaatacaatgttgaatagaaatggtgatagcaggttccgttgcgtagttctgatttcaaagggaatcttttcaacatctcattattaagtacagtgtttcggtctaggttttctgaagaccttctttatcaggttacagaagttcccttccatttttactttgccaagagatttttttccccctctttcttttgatcaggaatgaatgttgagttgctaccgcatctttcatgtgtcttctgttgcagatttctctttttgacaaaaagagaacaggtcttgggtcagagccttgggcgagcaacagaatctacctagaatttagtaacgttgtttgaaccatatttattctacagttgcttcttcttttatttatttatttatttattttgagacagggtctcattgtgttgcctgggccggagtgcagtggtgcgatcatagctcactgcagcctctacctcctggcctcaagtgatcctcctgcctcagcctcccaagtagctgggactactggccatcacaccaggctaatttttgtattttttgcagagacagtgtctctccgtgttgctcaggctggtcccaaacccctgacctcaaagtgatcctctcgccttggtttcccaaagtgctgggattacaggtatgagccatcacacccatcatacagttgtttctgtttgtagcccgtgagcttagttttgtaggaggatgtaaagctctcttcttaaacacaaaagagttaaagttcatgttccatatgcaatgggttgcatagactgtggcagcaattgagaagatgatacattctgcaaatggaagtgtgagaaacagggttacaacagacattaagtgccaaatgaattcacacacacagctatggcataatggttacgcacaggcttggaagtcatgctgcctgagtttgtatcccggctgtgtgtctcacctcagtttccttctctgtaaaatgaggataataatatgacttaccttgaagagttgctgggaggagtccatgttatctctgcagcatgctgaaaattgagagcatggtgggtggaagctcatgctagcttccactacacacaaggtaaagagaaaaggctgtggtcaagaaagtgggctcagctgggagttgtggctcccacccgtaataccaacatttagggaggctgaggcaggaggattgcttgaggaccagcctcggcaacataatgaaactctctgtctctacaaattttttttttttttttttttgagacggagtctcgctctgtcgcccaggctggagtgcagtggcgcaatctcggctcactgcaagctccgcctcctgggttcacgccattctcctgcctcagcctcccgagtagctgggactacaggcgcacaccaccacgcccagctaatttttttgtgtttttggttgagacatggtttcaccgtgttaatcaggatggtctcgatctcctgacttcatgatctgccctcctcggcttcccaaaatgctgggattacaggtgtgagccaccatgcccggctacaaaaacatttttaaaattagctggatgtggtggcacacatccattgtcctggctgcttgggaggctgagctgggagcattgcttggtcccaggaggtgaaggctgcagtgagctatgattgcatcgctgcactccagcctggacaacagagtgagagcatctctctctcgctctctctctctctcacacgcacacagacacatacgcacacacagacacacacacacacagaacgtgggttctagattcataccatctcggagtttaattgcagctcctcccctaacttactcttgctgttaatctcaagcagcatccccacaccgatctaagcctgctttcttgtaggtaaaatagacacagacgggtgtggtggctcatgcctgtaatcccagcactttgggaggccgaggcaggtgcattacttgagatcagttcaagaccagcctggacaacatggtgaaatccccatctctagcaaaaaatacaaaaatcagctggacgtggtggcacactcctgtagttccagctacttgggaggctgaggtgggagaaccgcttgaacctgggaggtggaagttgcagtgagccgagatggtgccactgccctccagcctgggcgacagagcaagactccatctcaaaagggtataaacactgacagtgtggttatgagaatggagttaatctgaatgcctaaccatgtgtagtaggcatccaagaaatgcattttttttttcttttgagatggaatctcactcttgttgcccaggctggagtgcagtggggatatctcagctcactgcaacctccgcctcctggttcaagcaattctcctgcctcagcctcccaagtagctgggattacaggtgcccgccaccatgcctggctaattttttttgtttgtttttttggtatttttagtagaaatggggtttcaccatgttgcccaggctggttttgaactcctgacctcaagtaatctgcctgcctctgccttccaaagtgctgcgattacagggatgagtcatagcacccagccaaaaaatgcaaatattgttatggtaggggcacagagtaggggttggcaagtatgtcagaatcacctgaggagagtgttaatatgcagattcccaggccccacctccatccatctagttaacaaacatatatcaggggcctcctacacataaggtactatcatagttgctgggcattcaagaaacagaacgatggccctcccctcttcaaactgacattttatttgggtgagataaacaataaacacaacaagagaagcaaaactaaggggatagaaaacgccggagtaggggtgtgggattttatgaaattttaattaatttatgtatatatttattttctgagatggggtctcgctctgttgcccaggctggagtgcagtggcaccgtcgtggctcaccgcagcctccacctcctgggctccaacaatcctcctctctcagcctcccgagtagctgggactacaggcacccgccaccttgcctggctaattttttgtgtttttagtagagacgggatttcaccgtgttagccaggatggtctcgatctcctgacctcgtgatccgcccgcctcggcctcccaaagtgctgggattacaggcatgagccaccacgcccagccttaaatttgtttttgtagaaatgggatctcattatgtggccccaggctgattttgaacacctaggctcaagtgattctctcacttccacctcccaacgtgctgggattacaggtgtgcaccaccacacccagctgactttttattttttgtggagatggggtctccctgtgttgaccaggctggtcttgaactcctgggctcaagtcaacctgggagtgggattttaaatagggtggctagaggaggtctcacagagaaggtgtcctttgaggaaagacaaagacgttggcaaggaactttcttctggatatcagggtgtatttgtttgcgtgggtgccacaacaaagtaccacgagcttggaggcttaaacagcagaaatttatcttctcacaataaatgtcttgttcacctccctatcctcccctcttcttcctcctcgcccactctaactccagccacatgggcctccttgctgttcctccaacatgttaggcaagatcctgcctcaggaccattgcatgcactgttctctcttcttggaatacactttcttgtgtgctatgggttgaactgtgtccccccaaaatttatacattgaagtcttaacccctagtacctcagaatgtggcagtatttggatatggagtatttacagaggtagttcagttagaatgaggtcatctgtgtgggccctaatgcactgtgactgatgtccttataagaagagtaaactagggtgcaggcagggcaagaccacgtcacagtgcagggagaaggtggctgtctactgaaatgagcccttagaggaacctacaaatatctagtcctaaaaagtagaaacaaactggccgggcgtggtggctcacacctgtaatcccagcactttgggaggccgaggcgggtggatcacctgaggtcaagagttcaagaccagcctgaccaacatggtgaaacctcatctctactaaaaatacaaaaataagctgggtgtgatggcgggtgcttgtaatcccagctactcaggaggctgagacaggagaattgcttgaacctgggaggtggaggttgcagtgagctaagatggcaccattgcactccagcctggcggacaaagtgagactccatccccctcaaaaaaaagaaagaaaagaaacaagctatccatgaaaacactttgtgatgtgctgttttatatcacagaatggaacctgtgttttgattcaacaagttcaaaacactcttttcataaaatctaagaagttatgtttctgaacctattgagcctttataggaacatatgaatatccagtcctaaaaactagaaatgagcgatctgtgaaaacactttgtgatgtgctgtttcatatcacagaatgggacctgtgttttgaagaaaccaaccctactgacaccttgatcttggacttctagtctcagaactatcttggacatttcctatgaatagaattgtacaatacatggcattttgtgatttgcttctttcactgagcatgtttttaaggttcatccatgttgtagtgtggaacagtattttgctccttttttatggctgagtaatattccattgtgtggatttgcctgtactggacatttcctataaatagatgcatgcaatacgtggctttggaagatggattttaaccaactctactgacgagtctgctttaggactcttggtccagactgacttcatggagagtgttgggggttgtgggagaggccaagcctacaagctgtgggaagctggtggatggaaggctggttagaattcttcaggatctggggaacctcagagagtgctgaacctgttgggacgttggatgagccaatacttggcaaatgcaagaatacaaaggtttctttctttctttttctttttccagatactcaaaagctggggccatgttacatgtgcccagctgtttcattagttaatatcttttggttgcaggccatggcaaccaaatctaaagtaacttaaacaagaaaaggaatgttttggctcatgaaataaaaaagtttagggatggccaggcatggtggctcccacctgtaatctcagcactttaggaggccaaggtgggcagattcctcaagtccaggaattcaagaccagcctgggcaacatagcgagacctcgtctctacaaaaaatacagaaattagctgggtgttgcgacacatgactgaagtcctagctacctgggaggtggaggcaggaggcatggttttttgtttgtttgtttgagacagggtcttgctttgttgcccaggctggagtgcagtggtgccatcatagctcaccgcaggctcgaactcctgggctcagtgatccactcatctccgcctcctgagtagttcaaaatgtttttcaggtcatccacattgtagtatgaatcagtgcttcattcctttttatggctgaataatattccattgtatggatataccacatttgtttaaccgttagtgattaattttatcttttgtgaattttaactcaataaaaacattcagagcatagatctggatcaggcacaacttaatctttaccagaagataattcaatttcatggaagagggtctgtgctttcatttcccctccacaccagtccccaagctaggtggcctgggggtcagtttctcccctgccctttcgtactgccccaccctcatttctctgtctcctcacagttcctgtgccttaagaacattagaaccttcctgtccacctgctgtgagaagttcggcctcaagcggagcgagctcttcgaagcctttgacctcttcgatgtgcaggattttggcaaggtgagctgcacacttgaagcccaaagactgagtttcagttaatttctattgacgtctacactgggcaagctaaggactgtcaggggacaggcagacaagccagaccaggccatatacaagacgcaaatagcactggcttgggatatgtggaactgggtttgagttcctgctctgacacttgctgtgtgaccttggatacgtggctgtgcctctctgagcccctcgtttctcatctgaaatatgggaatattatcatcctgccctctctgagtggctatgaggattaaatagaaagatagagggccgggcgcagtggctcatgcctgtaatcccagcactttgggaggctgaggtgggcagatcacgaggtcaggagatcgattccaccctggctaacacagtgaaaccccgtctctactaaaaatacaaaaaattagctgggtgtggtggccggcgcctgtagtcccagctactccggaggctgaggcaggagaatcgcttgaacctgggaggtggaggttgtagtgagccgagatggtgccactgcactccagcctgggtgacagagtgagactccgttaaaaaaaatactaaaatataaaagaaagaaagaaagataggagcaaagggtggggctcatttgagagaacgatggtatggggaataggaggtagagaaaatcctgaattaggcttccaagaggcatgggatctagcgcctcagacagagccttgcagctggaagctgtgttctgccgtgggggtgtacaaggggctcactgagtggccactgccccgtcacaggtcatctacaccctgtctgctctgtcctggaccccgatcgcccagaacagggggatcatgtgagtaaccacctgggccttgggccatttagccccagtcctccccctccctgaagccccacttctacccagcccccaggcccctggctcacaccctcctgaccccccaggcccttccccaccgaggaggagagtgtaggtgatgaagacatctacagtggcctgtccgaccagatcgagtgagtgctcaggcctgtggccgcacagctcactggagcaccgtcctgggggtggagggtgtggggggacatggccttgccctccgggaaataaggtcataccctggtgtctggggcacacaaccttgcctgagagtctggggagacacagccctgccctggggtcttgggggacatggcactgtcctggggtcttgggggacatggccctgccctggagcttggagggacatggcctgcccttggagtctgaggtcccacccttggagtcttggggggacaaagccctgcgctggggtctgcggggaccctgctgtgatctgggagaggtccaagggatccctgacctcacaacccacagcgacacggtggaggaggatgaggacctgtatgactgcgtggagaatgaggaggcggaaggcgacgagatctatgaggacctcatgcgctcggagcccgtgtccatgccggtgcgtgacgtggagggtcgggcctggggagggcgtgggcggggggcagccccaggccccccaacaccggcctctcccctcgctctcagcccaagatgacagagtatgacaagcgctgctgctgcctgcgggagatccagcagacggaggagaagtacactgacacgctgggctccatccagcaggtgggcgcctcccacccagcgcctgccgggcgcatgcgcgggagctgggccggcaggtgcacgtccacctgtccggccgctctgggcagctgaggatttcctgctcccatcgcttttcctttctgtgactgtctccgtctctgagtttctctgacttacatatgtatatataaatatgagtctgacgtatatatatattaaaaaatatatataaaatataggacactgcctgcaggagcagtcaaaaaaccaaaaacaaacaaaataaatacaaaatcaaaaatatataaatatattaaacatatacataaatagaaaatatataaatatatacaaagtatatataaaaatataaacatataatatgtataaaatataaacatgatatatgatatttataagatataaaatatatagtttttcatatagagctatatgtaaataatatatacaatatataaatatataaaatataaaatgtagatatattgatataggtatatatctttttatatagatatatatttttaatatacaagatatatgtccatatgtagatatatatacctttatatatcttatatacataaaagatatatatctttatctatctatcttttttttttttgagacacggtttctctctcattgcccaggctagagggcaatggcaagctctcgctttactacaatctctgcctaccgggctcaagcaatccttctgcttcagcctcccaagtagctgggattacaggcatgcaccaccatgctcgactaatttttgtatttttagtagagacgaggttttgccatgttggccaggctggtctcgaactctgacctcaagtgatctgcccacctcggcctccaaaagtgctgggattgcaggcatgagccactgtgcctggcttatatatctatcttttaaagatatatatcattatttaaagatatatatataaagtatgtataagatatgtaatagatacaaatatatattttatatatattttttgttatgttaaccaggctggtcttaaactcctgggctcaagcaatcctcctgtaatccaagccctttgtgaggctgcactgggcctcttcctcttgtctctctgtctctctctttatctctcactctgtctctttttccctctgggtctcctctcgctactttcttcctcagtgtgtcattctctcctttgtagctctttatcccaggctcagtctttttctgtatcctcacctctccatttcttttaaaaatagctttattgagatttcattaatatacatgtaatccacccatttagaatatacagttcaatggtttttggcacacacaagattatgcagtcatcatcactgtctaattttggaatattttcatttgttttgttttggttttttttgtttctttttttttgatttgttttgttttgaaatgtggtctcactctcccatccaggctggagtgcagtggcacgatcatagttcactgcagcctcgaactcctgggctcaagtgatccccctgccttaacctcctgaggagctggggccacgggtgcatgccaccacaccctgcttaattctttaattttttttgtagatatggggtcttgctatgttgcccaggctggtctcctactcctggcctcaagtgatcctcctgccttggcctcccaaagtgttgggattttgggtgtgagccaccaccccggccttaattttagaacgttttcatcatctcccaaagaaaccccaaactctttagctgttccccttcaatctcttatcttcccccggtccatggcaaccacgagcttactcgctgtctctgtggattggcctcttctggacatttcatataaagggcatcacatactatgtggtttatatgtgtctggcttcttttgctgagcgtagtgttttcaaggttcatccacattgtagcctgtgtcagagcttcattccttttcatggctgaataatattccattgtatggatggaccacattttttttttcttttttgagatagagtctcactctgtcacccaggctggagtgcagtggcgtgatctcagctcactgcaacctctgccatccaggttcaagtgattctcctgcttcagcctcctgagtagctgggatcacacgcatctgccaccgtgcccagcttatttttgtagttttagtagagacggggtttcaccatcttggccaggctggtcttgaactcctgacctcgtgatccacccacctcaggctcccaaagtgctgggattgcaggcgtgagccaccgcacctggccggaccacatttgaaacacccatttacccattgataagcattttggttgtttccgcttttgggttattatgaataatttcactgtgaacattcttgtacaagtttttgtgtggacgcgctgcctctctttatctccctctctctgtctccttcccctgtctctctgagactggtctggaggagggaatcttatcttccgtcatctttctctcccttccccgcagcatttcttgaagcccctgcaacggttcctgaaacctcaagacattgagatcatctttatcaacattgaggtgagccggccgatccccagccctcttgggtctgtctagtgcggataacctgctgcccctacctctccctggagtacgggggttgggagttgagcggcatggggcgggtggatgaccctttccttcctggccccctgagccctgggctctggtcccagccctcacccttccctccgagtaggacctgcttcgtgttcatactcacttcctaaaggagatgaaggaagccctgggcacccctggcgcagccaatctctaccaggtcttcatcaaatacaaggagaggtgagacccagctggccagactgaagctctggggtcactctgtcttgcctaggctgggcatctgagagaccttaccctcagacaccactggacggggaggactttttgctgtgtgttcatgggcgaggggctgcccatctctggttcaattcccagctctgctgtgtggcactgggtagtcacttaacctctctgtgcttctgcttcctcatctgtacatcagtgggccacaggaatgtgcctcctaggctggtggtgagggttgactatacggatgcacacagggcctggcacatagtagatgctcaataagtatttgttaaatgaaggaacattggccaggtgtggtggctaatgcctgtaatcccagcactttgggaggctgaggcgggtggatcatttaaggtgaggagttcaagaccaggctggccaatatggtgaaaccccgtctccatcgcctaaaaatacaactaaaatacaactaaaaatacaaaaaacaattagctgggcgtggtggcatgcacctgtaatcccagttactcaggagaattgcttgaacccgggaggcggaggttgcagtgagtcaagatcatgccactggactccagcctaggcaacagagcaagactctgtctcagaaataaaaacaggccaggcgtggtggctcacgcctgtaattccagcactttgggaggccgaggagggcagatcacttgaggtcaggagttcgagaccagcctggccaacatggcaaaaccccgtctctactaaaaatacaaaaattagccaggcatggtggcaggtgtctgtaatcccagctactcggggggctgaagcaggagaatcgcttgaacccgggagatggaggttgcactgagcccagatcacaccactgtactccagcctgggagacaagcgtgaaaccccgtctcaaaaataaataaattaattaaattaaataaaaataaataaacattgggcagagacaataccaggtactgtggtgaaattactgtagcattaaatgagataatgctacaatagcctcacatgggagatgctattgttatgcccatttcacagatggagaaactgggactcaggtttcttctccagcggggaagagcaaggccagggctgacgccagcctctgcccgaccttgatgccagtcacctttacctggtggcctgtcttctccctgtaggttcctcgtctatggccgctactgcagccaggtggagtcagccagcaaacacctggaccgtgtggccgcagcccgggaggacgtgcagatgaagctggaggtgggcgccgggccacttctcgggggcctctcccgctcctccccaggccctgggggcagcagggaggacactgagttgcagatggtccactttctgctgcagcccagccagagatccaccaaaggactagggagggaggtactagccagccaagcagaggaaatggagaagaacagaaatgggctggccctgggtctgggctgacccctgatatcagggtgaagtcctgaccctgaactgagctctgatctcacactcaaccccagccctgggctgagccctagcactgattgtaccccaagtcgggctgagctcccacttctcactgaaccccaattccaaccaacccctgatcccaggctgaacttgatcttgaactgaacttcaacctggatctgtctggtggaaacacagacagggcaggggtggtgaggacgggggctctccagatctgtccccctccccatctccagcccccctcagcaggcagaatactggacctctatcccaggcagcatttgccacattccagtgggtttgtttgtttgtttgttttgttttgttttgtttttttgagacagggtctcattctgtcccccaagctggagtgtagtggcatgatcatagctcaccacagcctcgacctcctggactcaagcaatcctcccaactcctaccttggcctcctgagtagctgggactacagatgcatgccaccattcctggctaatttttgtgttttttgcagagatggggtttcaccatgttatccagggtggtctcaaactcctgggctcaagcgactcacccactcagcctctcaaagagctaggattacaggcctgagcaatcgtgcccagcctcttcccattgcttttttgtttgtttgtttgtctttgttttttgagatggagtctccctctgtcacccaggttggagtgaagtggtgtgatctcagctcaatgccatctctgcctcccgggttcaagcaattctcctgcctcagtctcctgagtagctgggattgcaggagtctgccaccacgccagctatttttttttttttcatagcagagacggggtttccccgtgttggccaggctggtcttgaactcctgacctcaagtgatcctcccgcctcggcctcccaaagttccttccagtggttctcaagctgcccccacctcatggagtccttttcctgtttccttgggggcagatatgatgctttggcctctagaaaaattcccacagctctggggtggagagctgctcacgtatttattcaaatctatctgcacccaccctgcaactggctgtttctgggacctgcctcagtttccccattgttctctgattccccaggaatgttctcagagagccaacaacgggaggttcaccctgcgggacctgctgatggtgcctatgcagcgagttctcaaatatcacctccttctccaggtgccaggcacatctctaggcgtgggctccacgtacctactctcctgtgtctataaaagtggggacggggctggcttctgggggttgggtctctaggacgctcggggatgggtcactggggtcatgtctcagcctccagggtcagcagtacgatggaggagctggtgagctagcattgtttggaaggccctccccgcagggagaaggggaggggcccaggtgacgtctgacgtcttggttctctcaggagctggtgaaacacacgcaggaggcgatggagaaggagaacctgcggctggccctggatgccatgagggtgagtgggtgtagggtgctggtgactcacctgctgcagacaccctcctggtaggggctgatcctctagccgggattaggtaggagcctgggtcggctgttggggggccaggttcacccctgccccctccccaggacctggctcagtgcgtgaacgaggtcaagcgagacaacgagacactgcgacagatcaccaatttccagctgtccattgagaacctggtgaggcggtggagccgggtgggccaggggtgtggccacgtggggagagtgtgtgtctggctcctttcttgggagacccttgctagaccccctgcctactgcataggaccagtctctggctcactatggccggcccaagatcgacggggaactcaagatcacctcggtggaacggcgctccaagatggacaggtgggtggagtcaacatggatctgggatggagcctgggcaaaggggtgggaccaggctcctagatgggcaggtgggtggagtcaacacagatctgggtggagcctgggcaggggcggggccgggcttctagatggacaggtgggtggagtcgacatagatctggagcagagcctgggcaggggcagagccaggcttctagataggcagatgggtggagtcaacacagatctgggaggagcctgggcagggatggtgccaggctcctagatgagcaggtgggtggagtcaacacagatctgggtggagcctgggcaaggtgggggccaggctcctagatgggtaggtgagtggagcaaaccatatctgtggtggagcctgggtagggatggggccaggtttctagataggcagttgggtggagtcaacataggtctggggaagagcctggataggggcgtggccaggctcctagatggacaggtgggtggagccaacacagatctggggtggagcctgggtaggggtggggccaggttcttatgtagacttgtaggtggaattaagatgaatttggggagggacctgagtgggggtgaggcaagatttctagacagacaggtggtagacccatccagagaaggcggtggagccttgatggacaggcaggacagggccagcgaggggtatgggtggagcgaagactgacaggcagtagggccaatgcggatcacgtgggtgaagtcaggatggacaggtgggcatggccaagttggccaaggaggaggagaagggcagggtgggaccaggatgtggaggaactggtcagagggctgatggggacagttgggaagagccagacaggaatgcgttatccatccttccaggtatgccttcctgctcgacaaagctctactcatctgtaagcgcaggggagactcctatgacctcaaggactttgtaaacctgcacagcttccaggttcgggatgactcttcaggagaccgagacaacaagaaggtggggctttgacgccggaactatggggtcctccacgcagtcggcagcttagccctctccacttgggcatgtgcctgtttgccagactacatctacatggaagtgtgtgttaatccactcaacaggtgttttttgtttgtttgttttgttctgttttttaagatggagtctcgctctgtcgccaggccggagtgcagtggcacaatctcggctcaccgcaacctccgcctcctgggttcaagcgattctcctggctcagtctcccgagtagctgggactacaggcacacaccaccacgcccagctaatctttgtagttttggtagagacagggtttcaccatgttggccaggatggtctcgatctcttgaccccgtgatccacctgcctcggcctcccaaagtgctgggattataagcgtgagcccactcaacagtttttaaattgagcacctactatatccagggcactcttctaggcactaggactaaaatggaaagcaaaacagaattttcattttgtttgtttgttggtttgtttttgagacagtctcactctgttgttcaggctggaatgcagtggcacggtcttggctcactgcaacctctggctcccaggttcaagcaattctcctgcctcagcctcccgagtagctgggattacgggcacccaccaccatgcccagctaaattttgtatttttagtagagacgaggtttcaccatgttggccaggctggtctcaaattcctgacctcaagtgacctgcccatcttggcctcccaaagtgctgagattacaagcgtgagccactgtgcccagcttattttatttcttgtatggtacttgcgttcttatgggatgctttctacaaagaaaataaagtaggtggctgggtgcagtggctcatgcctgtaatcccagtactttgggaggccgaggtgggagaattgcttgagcccaggagtttgagatcagcctgggcaacatagggagatccccgtctctacaaaacataaaaaaaaatttagctgggcttggtggcacatgcctgtagccctagctacatgggaggctgaggtgggaggatcgcctgtggctaggagttggaggctgcagagagctatgattgcactacagctaggaccacagagtgagatcctgtctctattaaaaaataaatgaatgaaacaggagatgtggctgtggtaggtgagggtgggagggggagctatcttacctccattgttcagggacattctctgtggaagtgacatttaagctgagacccctctccctctcggctcttccttacttccttctgctttttctcctgtgaactcttccgttcgcttcagtttttgccctggagttccccctgtgctctggtctgtggcttctctatttctttttttgagacggagcctcgctctgtcaccaggctggagtgcagaggcatgatctcggctcactgcaacctccgcctcctgagttcaagagattctcctacctcagcctcctgagtagctgggattacaggtgcccgccaccacgcccagctaatttttttgtatttttagtagagacggagtttcaccacattggtcaggctggtctcaaactcctgacctcgtgatccgcccacctcagcctcccaaaatgctgggattacaggtgtaagccaccgcgcccggctggcttctctatttctcaacctgtgtctccctcgaggagccagttgctgtcttgtaactgcctgcttacagcatccgtctctcctaccaggctggagctctggggaccacatcctattcactgctctgtccccagctcctagcagtgtctgtttctcagcaggtgctgcaccaatgctttgttgaacagaaaaatcgatgatgagtgacatgctgtgtctggtgtgtgcttctgcaaaggggagtgtgtgtgtgtgtgtgtgtgtgtgtgcatgtgcacgcctgcgtatgtggttttgggtttatggttgtgtatttggatatcctagaaagcccttttacaaggatatccatgcatggtgctaggggcatagagactgtcatgggcttgcctgttccctacagagggaggggtgggtgggtgtgtgctcccaccctctgcgggggcagtgccttcagtctgagctctgcttccctgcagtggagccacatgttcctcctgatcgaggaccaaggtgcccagggctatgagctgttcttcaagacaagagaattgaagaagaagtggatggagcagtttgagatggccatgtgagtccccgtcttcctccctctttctgtccacagaggggcaggggctgggaaggaggaacgtgatctagtccctactctgtcctgacatgccatgggaccactctgaaccacagtctcttcatttgggaaataagagggacaggcccaaggctgtcttcatccttggaatgcaggggttgtgtgcaagcttcagttaccagcccagactcttctcctttcctcctcctctttcttgttctcctctcctcttccttctcctccttctggtttccttcctcctcctcctcctctttctccttctcctttcctcctcctctttcctcctcctccccttcctcttcttcttcctcctcctctccttcctccccttcctcctcctcgccctcctcttcctcttcctcctattcctcctccacctcttcttcctcctcctccctttcctccccttcttcctcctcctcctcctcttcctcctcttctttctcttcctcctccctttcctcctcttcctcttcttccttttcctcctcctccttcttcttcccctcttcctcctcttccacttttgtcttctctttctcctttttatgtgaggcaaaattccaacaacaaaaatctaacaatttcgaagtgtatgatcgcatggcattttgtacactaacagcattgtgcaaccatcacctctatccagtttcaaaaccttttcatcagcccaaaggagacctcatacccattaagcattcactcccaattccccgctctcgcagcccctggaaactcctagcctgctttctctttctcccaatgtgcatggcagcacgattcagtgtggccaaagggtgaaaacgacccaaaagccaatcaatgaatgagtggacacgcaaaacgtggtctgttcataccatggaatagtattcagccataaaaaggaataaaatactgaccttcttttttttttttttttaattttcccctgccagctccaacatctatccggagaatgccaccgccaacgggcatgacttccagatgttctcctttgaggagaccacatcctgcaaggcctgtcagatgctgcttaggtgagaatctgggaggagggtcctgcataccggacttggtcatcagttccttgctagagaagatggcctagtaattggttccctaaattgggagatgggggagtccctactttgatcttctgcttctccgtcactctcctgatctaaagagaacccaaggggtccctttatgtttttagcagaatatttggccctgtctgtaaaggtcactcgctcttctttatgtgttccctgcatctcagaggtaccttctatcagggctaccgctgccatcggtgccgggcatctgcacacaaggagtgtctggggagggtccctccatgtggccgacatgggcaaggtacgagtgggagggaggctgggaggtgagcttggttctctttggaggatttcccgttctcaccatttcctttaccctcccgtagatttcccaggaactatgaagaaggtaagactttcccgtggtccttcctgtgtaccacaaataatgggcaacagcgcggggaggacccaggacatcctggaactgggcaggatcctttgtggggtgaggagagtaagggggcctacaagcccccaggctgggcataggtagacaggctttctttgtttctccttccaggacaaactacatcgcagggctcaggacaaaaagaggaatgagctgggtgagttggcaggggttgctgtgtgggggcaggaggaaaattcatctctattgatgttgacccagggacagatctccataatcatattaacagccacattgggccgggtgcaatagctcacacctgtaatcccaacaatttgggaggccaaggcgggaggatcgcttgaagtcaggtgcacaccaccacgcctagctaattttttttttttaaatagagatgaggtcttgctacgttgcccagccatactgtataaattaaatcatacagtatgtgcttattttaattaattaatttatttatttctggagatggagtcttgctgtgtcgcccaggctggagtgcagtggtgtgatcttggctcactacaacctccacctcccaagttcaagcgattctcctgcctcagcctcccaagtagctgggattataggcacatgtcaccacgctcggctaatttttgtatttttagtaaagacggggtttcaccatgttgggcaggctggtctcgaactcttgacctcaggtgatctgcctgctcagcctcccaaagtgctgggattacaagcgtgagccactgtgcccagccttaattttaaaaaatttaaaaatatatgtattttattaaatatataataatttattatttaataatatattaatattaattaatataatatagtaataatatattataataatatataaaatatatattaatatatatttattaaaaatatattatatgtatatataatatatcttttttttatttttagaggcagggtcttgctctgtatcccaggctggagtgcagaggcaggagtgttccacttatatgccatttatatgacatataaatatataacataagtcaggtgtggtggttcatgtctgtgatcccagcactttgagaggccaaggccaggagtttgagacaagcgtgggcaacagaacgagaccctgtgtctacaaaaacatttttaaaaattagcggggttcttgcttgagcccaggagttcaaggttgcagtgagccatgatcacgccactgcacgccaacctgggcaacagagcaagatcctgtttcaaaaaaataaaaaaataaatatatgaaatctatgaatgggtatgttttcttcttattattacttactatgtaattagcaatagtcagtcagctttcttagcaagagtcaaaattagaaacaacccgtgtcctttgtacaatagaatatatatatgtgtatatatatatacatacacacacacacacacacacacacacacacacacgtattttattgagagaggaaatacatactttaaggtatgtaaaaatcaataaatcttaagtatatgacttaatacatttttatccatgcaaccaacaatcaaataaaaatgtagaacatttccatccctccagaactgcactgtgtaatataaattaattaaaatgaaatcaccttaaaaatttttttgctcacgttagccttgaagttctcaataatggcctgtggctagttgctaccatattggacatatccatcaccacagaaagctttgtcagaaagcactgctactcacctatctcccatagggaaccactgtctgacctctatcaccatagattaattttgcctgctcttgagttttctataaataaaatcatacagtacatgcttatttcatctggtttcttttatctgacgtaatgacggtgagatgcattgatgtgatcgcctgtagcaatagcttgttccttttcattgttgtatagtattccattatgtgatgatatcacaatttgtttattgattgatcaacctattgaggacatttggttggttgccagtttttggatattgtgtataaagctgcaacttttgaaggactttttttttgttttttgtttttttgtttagttttgttttgagacagagtctcactccatcgcccaggctggagtgcagtggcatgatctcagctcactgaaacctctgcctcctgggagttcaagtgattctcctgcctcagcctcccaagtagctgggattacaggtgcccaccaccacacccagctaatttctgtagttttagtagagatggggtttcaccatgttggccagtctggtctcaaactcctgacctcaggtgatcttcctgcctcggcctcccaaagtgctgggattacagacatgagccaccgtgcccagccaggacacatgttttcatttctcttgggttgctgggttacagagtagatacaatgtttagcttcagtagatattgccaaatagttttacaaagagtatccccaccagcaatgagtgaaaattccagtttctccacgtccttgtcaacacttagtattgccagtctaaaaagaaaaattttagccattctcgtgggtggcaagattcagggttgaaagttgactgccaaccaccctgtactcctgtaccctgtcctccaggtctgcccaagatggaggtgtttcaggaatactacgggcttcctccaccccctggagccattggaccctttctacggctcaaccctggagacattgtggagctcacgaaggctgaggctgaacagaactggtgggaggtacaggctggggccacaagagtgatggggtgggacccaagtgtagggttatggattcatgtggtctcagggagttgggtcatagttccaccatgctctggaggtgatgcctggggagtggggtaggtagactgagacttctgggcatggcttttctgagcgggccatcttcccaggaagctaatactcattatcacctctctgggctctccaggccatcctgagatagatggacaagcagagtgaccattgagcagagagatggacacacacacacacacacacacacacacacacacacacacacacacgagtgatggggcaggatccacgtgtagggttatgggtttagatggcaggtggggttatggatcctataacctctctgttcctgtttttgtctcctgggtgtttagggcagaaatacatctactaatgaaattggctggtttccttgtaacagggtgaagccctatgtccatgtgagtgcctcaagtctgaatggaataagggcaaggggtccagggcgggtcctgggaggatggacagacttggaaagacacccccggagttggggagggggctgcccatcatggcaggtctttctctaactcaaggcttcacccaccccaccaactgagcccagagaggggccaccctggaaacaatgattgatctttttctccttgatcatttttgtgtaaaggtcctttccttcctacatgggtatggtagggaggaaggagcagggacctagaaggtgggcctgccccttgcttccttctgagacaccaaattgagttctgtgggagcactgtggcctccattgcctgtgtccttgccctgctcctggtggacacacctgtccactccagcctctgctgttcttccagtgttctctgcttgatggacccctcgctcttcatgatgacttcagatctctccctctctccccaacctcagacaccccctacctcattcacagcaaatgaccccactgtacacttcacagcctgcagagggaaattctctccagtgctggttttaactttatattatttcagacttctagcaaagctatgagaataatgcaaagagctcctgtgtagcctttacccagtttcatcagttctgttaatgttttgttccatttgctctgtcatttcctctctctacccacacatagtatttatttttcctggaagagttaaaagtgagtttgcagacgacgttcccctttacccctaaatacttcttaagagcaagagccttctcatgcataaccagagcaagatattaaaagacacaaaattcaacattgacattatactattatttaattcatagtctgtatttaaatgttgtcaatttccccaaaaattttatcaaaaatttttttgttcctatggtttctccactgtcaagttacaataggaatttccaaccccatcattctttccaaatttattagctggtgttctgctgcaagaaagagctgtcctttctgccctcatctgtctgtctgtctgtctatctatctatctatctatctatctatctatctatccatgcatccatcttttatctatatatcatctatctatttacctatcatctatttgcctatcacctatctacccatctattatctatctatatcatcatcatcatcatcaatcttttatctatttacctatcatctatccatctattcgtcatctacatattatctatctatctatctatctatctatctatctatctatatgtctatctatccatgtacctacccatcaatccatccattcatcaatcagttcttctatccatccatccatccatccatccatccatccatccatccatccatctatcatctatctacttatcaatacattcatgatctattcatccacctatcatttatctatgtatcatctgtctatgtattatctatcatctatctattcaccgatcatctctctgcctatttttcacctaccgatctaaccatctatcatctgtctattacctatttattatcatttctctctcatctattcatttatcatttatccatcacctgtctgtttatcatctatcatctttccatctatctattacctgtttatccatcatccatctattctatctatctatctcttaattttttgttttagagagagggtctcattctgtcacctaggctggagtgcaatggtgtgatttaactcactgcagccttgacctcctgggctcaagcaatcctcccacctcaccctcctgagtagctgggaccacagatgcaagccattatgctcagctttatttatttatttatttatttatttaagatggagtttcactcttgtttcccaggctggagtgcagtggggtgatctcggctcattgcaacctccgccttccggtttcaagcgattctcctgccttagcctcctgagtagctaggattacaggcgcctgccaccacatctggctaatttttgtatttttagtagagatggagtttcatcatgttggtcaggctggtctcgaactcctgaccttgtgatccgccagcttcagcctcccaaagtgttgggattacaggtgtgagccactgcacccagccgcagctgtttttttgtgtgtgattttttttttttttagagatagggtctcactatgttgtccaggctggtcttgaactcctgggctcaagcaatcctctcatagaacatccttctcttttttcttttaaaaaattgaggtgaaatttgcacagcataaaactgaccgttacaatgaaaaattcagaatactgagtagctgagattacaggcgtgcaccaccacacctggctaattttttgtatttttagtagagatgggattttaccatgttggtcaggctgatctcaaactcctgacctcaaatgatctgcctgcctcggcctcccaaagtgctgggattacaggcgtgagccaccacgcccggctgggtatggcattttcttttggagtgataaaaatgttttagaactaggtagaggcggtgattcctcattcattttattattattatttttgattatggcaaaatatatagaacataaaagttaacaatgtaaccttttttttggagacaggatctcactctgttgcccaggctggagtgcaatggtgcaatcttggcccaccgcagcctcgcctcccaggctcaggtggtcctcacacttccgcctcccaagtagctgggactacaggtgcataccaccatgcctggctaattttttgtatttttcgtagcgatggggttttgccatgttgcccaggctggtttcgaacttctgggcccaagtgattcccctgcctcagcctctcaaagtgctgggattacaggcctgagccgccatgcccggccaacataaccattttctaaggtacagttgagtggcattaagtacattcacagtgttttgccaccatcaccaccatcatctccagaacacttttcatcttgcagcactctgaacccattaaacagcaaccacctattcccctctcccagcccctgacattcacattctactcttgagctctatggatttttctgtcctaagtacctcacctaagtgaaatcatacagtatttgtcctttgtgtctagcttgtttcacttggcataatgtattcaaggctcatccatgttgtggaatgtgtcagaattttctttctttttttttttttttttggtgaaatggagtctcgctctgtcacccaagctggagagcagtggcgcaatcttggctcactgcaagctccacttcccgggttcacaccattctcctgcctcagcctcccgagtagctgggactacaggcacttgccaccacgcctggctaattttttgtatttttagtagagtttcaccgtgttagccaggatggtctcgatctcctgaccttgtgttcctcccgcttcggcttcccaaagtgctgggattacaggcgtgagccactgcgcccggcctttttttatttttatttttttgggatggagtgtggtcctgttacccaggctggagtgcagtggtcgtgtaattataactcactgcagactcgaccccctaagcttaagtgatcctcccacttcagcctcctgagtagctgggactacaggcatgtgccaccatgcctggctaatttttctacttttaaaaaaatttttgagatggagtttcgctcttgttgcccaggctggagtggaatggtgcaatctcggcccactgcaacctcagcctcccgggttcaagtgattctcccacttcagcctcgagtagctgggattacaggcatgcaccaccacaccaagctaatttttgtatttttagtagagacagggtttcaccatgttggccaggctggtctcgaactcctgacctgaggtgatctgcccgcgttggcctcccaaagtgctgggagtacaggtgtgagccaccatgccgggcctaatttttgtattcttttgtagggacagggtttcatcatgttgcccaggctggtctcgaactcctgggctcaagagacccaccctccttggcttcccaaagtgctaggattacaggcatgagccaccgtgctgggcaattttcttaattcttaaggctaatattccatggtatgcatataccatgttttgtttatccgttttcctgtcaatgaacaattggttgcttcaacttttgcgtattgtgaataaagctgctacaaacatgggtatgcaaatatcatttcgaatccatgctttcaattcctttgggtatatactcagaaacaggacggctgggtcatatggtagtgtagttctagtttttaatgttttgaggaaccaccatactatttttcttttctttttttttttttttgatagggagttttgctctgtccccaggctggagtgcaatggaatgatctcggctcactgcaacctccgcttcccaggttcaagcaattctcctgcctcagccttccaaataactgggattacaggcatgcgtcaccacgcccggctaattttttgtatttttagtagagacggggttttgccatgttggtcaggctggtcttgaactcctgacctcgtgatccgcctgcctcggcctcccaaagtgctgggattacaggcatgagccaccgtgtccagcacatactgtttttcatagtgcaccattttccattcccaccaacagtgcacaagggttctgatttctccacatccttgccaacatttgctactttctgttttgtttgttgatttgtttttgccttatagtagctgtcctaattgttttaaggtagtgaaagtgagcactttcggccgggcgcggtggttcacgcctgtaatcccaacactttgggaggccgaggcgggtggatcacctgagctcgggagtttgagaccagcccgaccaacatggaagaaaccccatctctactaaaaatacaaaattagccgggcgtggtgacacacacctgtaatcccagctacctgtaatcccagctgaggcaggagaatcgctggaacctgggaggcggaggttgctgtgagccaagatcgcgccattgcactccagcctgggcaataagagcaaaactctgtctcaaaaagaacaaataaataaataataaatacatacataaaacaaaaaagaaagtgagcactttcatccatatttagatgagggttggtaaactttttctgtaaagagccgaagagtagtgtaaatctgctcaccctccagggtcccatatggttttgcaactcttcagctccgcccctgtagtgcaaaagtagccacagataatctgtaaatgatgtatagacacggctgtgttcctacaaagcataattcatgggcactgacaggtgaatttcatatgatcttcacaatcccaaaaacattcttttggctaggcgtggtggctcatgcttgtaatcccagacctttgggaggacaaggcaggaggattgcttgaggtcaggagtttgagaccagcctgggaaacaaagggagaccatcccccgcccgatcttgacaaaatttaaaaaaattaaaaattagcgggtgtggtggtgcgtacctgtagtcccagcacttgggaggctgaggtgagaggatcgcttgaacctgggagatcgaggctgcagtgagctatgatcatactgctgcactccaacctgggcagcatagtgagactctgtccctaaaaaaaagaaaaaattcttttgatttttgccaaccatctaaaaatgtaaaaaccattcttgacttgagggtaatgataaactgctgggaagacaacccctgctttatatgatactggggcagtctctcccccgaggttctgggactttatccccagtgagtaccacagtgcctggcacataataggcactcactaaatgcaagtggaatgagtgaatgaatgaatgaatgaagtgccctgccctctgctgtcaagctggggtctttacactaagttggggtctctctctgtattcttagggccctcctcaggacctgtctgttcatctctggtgagtagaaacatttatttttgtttcaatgagaggtttctgggttggggttccaggctgggtatgggaggaacctccgagccaattagttatgcattctgtgatccctgagcaccgacttctgaatctagctctgggctgggggctgctggggatgggacagacaaaggagggtccctcaccttgggagatgatggtcttgttggaaggaaaatggttacaatgatgatgacgatgatgacaatgatgatgatgataatgatgatggtggtgatggtaatgacagttccagttgtttttgtaggattttttgttttgtttgtttgtttgttttgcacctatagcatgtcaagcatataggggtggaggtttacagtgtggcttttggagcccgctgacctggattcaaattctgaccccaaccttacctagctgtatgaccttgggccggttacttaacctccctctgtttcagcattcctctctggaaaatagcttaatgacagtatctacttcatagtgtttttaggaggcgtaaatgagtctgtcaagtgcttagtcctggtcctgacacataatgaggactttatacagcattagctgttgttattactcatttaatctgttctaagatgcatggttgttttttttttcttcttcacatttgaacatctctgacattgaaatagctcttgcgatccacagtgtccatcttctgctgaattttataggcaggaagtgttctttcataatggcacataaaagaatggggcattgaacaattgctggcgcatcagctatttaatgagctcctttaatcttcacaaaagcccttcggaaaatagatttgattcttactctctgcccccatactttcttcttttcttcttcttcttctttttttttttttttttttttttttttttttttttttttttgcaaatgaggctgagagagggtaagtgaattacttaatgtcacatggtgaggaagtgatggagatgggatttgaacccaaagcctcagtgcctcagtttatcatctctggctagtaataaaacacagcatgatgatgctcccatcttcttgttgcccaggctggagcgcaatggcgtgatctcggctcactgcaacctccacctcccaggttcaagcgattctcctgcctcagcctcccgagctgggattacaggcacctgccgccacacctggctaattttttatattttcagtaaagacagagtttcaccatgttggccaggctggtctcgaactcctgatctcaggtgatccactcgcctcagcctcccaaagtgctgggattacaggtgtgagccacctcgcccagccgacgctcccatcttctaagtgtgtaccacatagtagcaggtgcactattgccatttataaaaaatgtgcatctgtggcgtctccctcttttcagaagaggaaattgaggcccagagaggcaaaaccagttgccgaggtcttagaacacgtaagaggcagggtcaggatttgaatcgtgctctcctgcgttagcgctccttccgcccttctgcgccgagatgtggtcaatggggtggggaccagggtgagaccagggaggctctctcgtgggtgcaagatttaaggggacgctgaaaatctcagtcattaaggtccatcatgttttaatgcaacattaaaaaaaatcaaaaacaagccaaaaaaatttcgagatgaacaaataccaaaactgtaactaaagacaggatccaatagagctgggagtaagaggaggtgggtgaggtgagtcgggcagtcagattctgtctttattcaaaatgttgatgtttgttcatcatggtttctttgcattcattaaaaaaagatgttaaacaccaactcgaaccagatttgcattcgttttttaaaattgaggtgaaattcggctgggcgcagtggctcacgcctgtaatctcagctctttgggaggccgaggcgggtcgatcacttgaggtcaggagttcaagaccagcctgggcaacatggtgaaaccctgtctctactaaaaatacaaaaaaaaattagctgggcatggtggcgcacgcctgtagtcccagctactcaggaggctgaggcaggggaatcgcttgaacctggcaggcggaggttgcagtgagccgagattgcgccattgcactccagcctgggcaacagagcgagactcggtctcaaaaaataaacaaacaaacaaataaataaataaataaaaatgaggtgaaattcatacaacataaaattaaccttgtaattgttactggcatttctatttctattcatatttacatttatattacatattaacatttacatgatgttagatattatatgcaattacatatgatttataattaatacttatcatttatattgtgtatttatgtttacaacctattatatattataccacatatcataaaatatatttatattatgctatgtattttcacaaattaatgttttttatttatgttgcacatttatgtttatattatattataccatacacaatatattataataagatttataggttacctatttactttacattatattatatttatctacaattatgtataatatataactaatatttattctttaaattgtatatttacatttatatcatcttatcacatattataccatatatcatagtatatttatattacagatttgcatttatattatgctacatattctagagaattaacatttattatttatattgcacatttatgtttatatatcatatgcgttatataatatactatactgtagctttatatattacatatttacatttacattatgttaggtgacataaaattatatattatgtataattaatatttattatttatatatgttacatttatgtcatattgtacgttatgtattttaacatacatttacattaacatgatgtatttacacttatataaaattatatattatgtataattatgtattacacataattaatattctttattgtatgttacatttaaatcatgttgtacattatatactataatatacattacattaacaagagatatttacgcttatataaaattatgtattatgggctgggcacggtggcttatgcctgtaatcccagcactttgagaggctgaggcgggtggatcacttgaggtcaggagttcgagaccagtttggcctacatggtgaaaccccgcctctattaaaagtacagaaaattagctgggcgtggtggtgtgcacctgtaatcccagctactccagaggctgaggcaggagaattgcttgaacccaggaggcagaggttgcagtgagccaagacagagcgaggcactgtctcaaaaaaaattatatattatatataattatgtattacatataattagtatgtattatttatgttgcccatttacatttataatatattgtatgttataccatatattatacatttacatagactatatatggtgtattccatgtaatataaatattacatgtatatttatattatattcatattatatattatagggttatatataactatctatattaacatatagctatctacaatagatagttatatattattatataatgattatatattattatatataactattatttatattgaatatttacactcacattataaatatattcatgttatatttatattcagtggctttttgtttttttttttttggagacagagtttcgcactgttgcctgggctggagtgcagtggtgtgatctcagctcactgcaacctccgcctaccgagttcaagcgattctcttgcctcagcctcctgaatagctgggattacaggcgcccgccatcaagcccagctaatttttgcatttttagtagagacgaggtttcaccatgttgcccaggctggtctcgaactcctgaccttgtgattcgcccacctcggcctcccaaagtgctgggattacaggcgtgagccacagcgcccagccagtgccatttggtatatttgcaatactgcgccgccatcactgccgtttagctccaaaacattctcagcacccccaagagaaaccccatcccgggcagttgctcctgcctcccgcagcccccgggaaccaagggtctccttcctgtctctgtggattggcgtgttctgggcatttcctatgaatggaaatcacacagtgtgtggccgtttgtgcctggcttctctcactgagtgtgatgttttaaggctcatctccattgtagcccatgtcagtgctgcttcccttttgatggctgactttattcattttgatttctaagaatattgtattagaatactgtttgttttacttattgtcatttaccttgatgactaggttttttggctctcacttacattttgcacctgaggctcgtgactcattctccttcccctacttctgtccgggtgaccacagagatgggcacacagtgagccttcaggaaatgcctggtgaagccatcgccaaattccagacacccagccagacccaaagggctgagccatccccccgaatccatgtgtcaaaccttagtggtgacctgtagaagtggaagcccgctccccatgtctgggctccggcccctgcctccacggggcctaccttggtgctgaagggctgttagagccaggctgtcaccaacttaaaaaatcaaaggggttcagggggaaaggcaacctccatatggcaatatggggacccaggcacggggaccgtgccacctctgtccttggtgtctctttgcaggtacgcaggccccatggagcgggcaggggcagagagcatcctggccaaccgctcggacgggactttcttggtgcggcagagggtgaaggatgcagcagaatttgccatcagcattaagtaactcctttctccctgactcatacccttttggggcctgggccctgcgggcctgggaaaaagggtatccaggttttactttatagaagtgtacggtaatagcatccaccttttactgagcccctgctggttcccacgtgcctttcaccttctttatttcttttaattgacgaccacaagaaagagatatgattcctatagaggctcaaaaaggctcttaaaattaattaattaatttgagtcagagtctccctctgtcgccctgacctttcttttttcccctttttttcttttcttttcttttctttttttttctgacagagtccctttgtcgcccaggctggagtgcagtggtgagatctcagctcactgcaacctcccaggttcaagcgattctcctgcctcagacccccgagtagctgggattacaggcgcctgtgaccatgcccagctaatttttgtatttttagtagatacggggtttctccatgttggccagcctggtctcgaactcctgacctcaagtgatccacccgcctcggcctcccaaagtgttgggattacaggcgtgagccatcgtgcctggcctgaaggcttttatttttaaccaattttcatatatatgttttttctttttttttaacttccaggaatttctaatttttttaatttaattttattattattattgttattttggtgacagtctgtctctgttgcccaggctggagtgcagtggtgagatcttagctcactgcaacctctgcctcccagattcaggggaccctcctagctcagcctccccagtggctgggactataggtgtgcaccaccacatccagctaatgtttatattttttgtagagacgagggtctctccttgttgcccaggctggtctcatactcctgaccttcaaacatcctcccacctcagcctcccaaagtgcaggtgtgagccactacatcccacctatatattttttttttcaacttattttagaatcagagggcacatgtgcaggtttgttacaaaggtatattgcacaatgctgagggttggggccatgaatgatcccaacacccagggagtgatcatatactcggtagtttttcagctctttcatcccaccctcctccctctagtgctcccccgagtctactgtttccagcctttttttttttttttttttttgagatggagtctcactttgccgcccaggctggagtgcaatggcatgatctcagctcactgcaaactccacctcccaggttcaagcgagtcttctgcctcagcctcttgagtagctgggatttacaggtgcacgtcaccatgcctggctaatttttttgtatttttagtagagacagtggggtggggggtggggggaaagtttcaccatgttggccaggctggtctcgaactcctgacctcaggtgatccacctgcctcggcctctcaaagtgctgggattacaggcgtgagccactgtgcctggccaatattattcccatctttatgtccatgtgtacccaatgtttaacccctgcttataagtgagaacatgtggtgtttggcttactgtttctgtattaattcatttaggataataacacccagtgcatccacgctgctgcaatgcacatgatctcattcttctttatggctgtatagtagtccatagtgtgtgtatatgtaccacattttcttatccagtccactgttgatgggcacctgggtcgatccatgtctttgctattgtgaatgctgctgtgatgaacaaacaagggtgtgtgtctttctggtagcacaattactttttcctttgggtagatacccagtcatagggtagctgcatcaaatggtggttctatttttagttcttcgagaaacctccaaactgctttccgcagtggctgaaccaatttacagtccagcccacagtgtagaggaattcccttctctcacatgctgctgagtttgtaatttcattgttatttttggctcctgtgaatttcccttactttttttttttttgagagctcagcaatttttttctcaacatttctagtgtttttttaaataggaagagttttgtttgtttgtttctttgttttttttttttttttttttgtgatctagtttgccagatgagcaggagtggaggtcttctccaaggccccttttagtctatttccaccatgttgacagaaatgggtctttcctccctcttcctttatatcctatggttgtctatattggtggaaggggaggtctcttcgtatccattctagaacactgccttctttacaagatcttactgacttctcaacaaacctgtgagtcagggaagatgattcctcttctacgagaggaagacattaaggctttagagtagcaaaggccccagggaatgggctctgttgggacagcttgtctttggtttccagtagttactcctccctgaaggggtcaaggttgcttcctccataactggggcttggtggggaatgggcctggtccccagactcagggcccggtgaccatctggttccagatataacgtcgaggtcaagcacattaaaatcatgacagcagaaggactgtaccggatcacagagaaaaaggctttccgggggcttacggtaagggtcaatgtccgctcaatcccagctttccagaacctaggaggaccctccctgcacctccgccttgggacccccttttcccacattcagggtgacccccctccagtggcactacagtgcaagtgaccttaaacttatgctcttaatgatgaacaatgggaataataatgaataacagcagttgaatattgacagagcacttaagtgtaagatatgttcatttttaaattttatttatacatatattcaagcattatgtatatatgtatgtgtgtatatatgcatatatacatacatatgtatgtatgtgtatttaaattttacttacgtatatatacatatgtatacatatgtatgtagggtacatgtatatacgtgtatctgtttatttttatatatatagatagatagagagagagagattgagagagagaaagagagtcttgctctgttgcccaggctggagtgcagtggtgcaatcatagtacactgcagcctcaaattcctggtttaaataatctctcgcctcagcctcccgagcagctggtactataggcatgcaccatcatgcctggctaattttaaaaaaaaattttttttttgtagagatggggacttgctttgttgctcaggctggccttgaactcctgggctcaaataatccttctgtcttggcctcccaaagtgttgggattacaggtgtgagctactgcattcagccctcaaatatgttatagatagaaacctaattaatcccctcaaccttctttctgagttcccatttcacagatgggtaaaactgaggtttactcctcgtctagcttcactgaatggcagagcccatagcttgtctttgcctaatctgctgcataatcatttcagcaacaactcaaatgccttttgagggttcttgcttctgtttggtgccttgtaattttcaaccatattttagacactttaggcctaatgatctaaggcatatggtttttacccatggtctgtgggcccttgagaagctgagtcctctgaaagaaaatcagaatgttgcatgcatctgtattttttgtcttagatttcacttgattctcaaatggatccttgactcccccaaagtttaatttattcaacaaatcttttttttcctccatactttttattctgaaacatattcccccaatttttaacttctgaaaaatttcagacaagttattggaatagggtagtgagtatctatgaacctttcatataggtttactttaaaaaaaatacaagagacagggtcttgctctgtggcccaggctagagtgcaatgttgtgatcatagctcactgtggcttcaaacccctgggctcaggcgatcctccctcctcagcctcctgaatagctgagactacaggcatgcactgtcatgcctggctaattgtttaaatcttttttagagatgggatcttgctatgttgcccaggctggtcttgaactcttggcttcaagtgaacttcccaccttgacttcccaaggtgctgagattccaggcatgagccactacatctggcctgatgatgattgctaattgtaaattaaggcatgtggccccatagaaggttttgaatttggtgagctaattatctggtaaatttatcacgaagtaagttagtccactattgaaagaacctgtttttggccgggcacggtggctcacgcctgtaatcccagcactttgggaggccgaggcaggcggatcacgaggtcaggagatcgagaccatcctggctaacacggtgaaaccccgtctctactaaaaatataaaaaattagctgggcgtagtggcgggcgcctgtagtcccagctactcgggaggctgaggcaggagaatggcatgaaccctggaggcggagcttgcagtgagccgagattgcgccactgcactccagcctgggcgacagagccagactccgtctcaaagaaaaaaaaaaaagaaagaaagaacctgttttaggcagtgtggtcccttccccataaatagtcctggctgctcagggaggtgatgaactccccatcatggggagtattcaaggggtcactttccaaagaggccagaaacagggcctgcttcatgtgaggagttgcatatggctgttcctagctctgcccccttatgggctggcccgctgggatagcatctgccatgtggtccgccttctaggagctggtggagttttaccagcagaactctctaaaggattgcttcaagtctctggacaccaccttgcagttccccttcaaggagcctgaaaagagaaccatcagcaggccagcaggtaggaggtctcagactgggggcttacagcctcagccccttcccattgtggagggaaactttggggatgccattgacaccccttccaatggccttgcagaggtcatatctgtgcagtagcaggaacccctttccactcctgtctatcccttcctatatatattttaatataatataatttaattaattaatttatttattttttgagacagagtctcactctgttgcctaagctggagtgcagtggtgcgatcttagctccctgcaacctttgcctcccacctcttgggttcgagggattctcatgcctcagcctcaaaataaaaaaataaaaataaaaattccaaaccagtcttattttctggctgggtgcggtggctcatgcctgtaactccagcacttcgggaggccaaggtgggtggatcacttgaggttaggagttcaagaccagcctggccaacatggtgaaactccatctctactaaaaaaaaaaaacataaaaatcagccgggcatggtggcacaggcctgtaatccccgtgattcaggaggctgaggcaggagaatcacttgaacccaggaggcataggttgcagtgagctgagattgtgccaccgcactccagtctgggtgacagagagagactttatctcaaaaaaaaaaaaaagtgttattttctaaattcagacgggaggatgatgctgggagtacaattgtgtccccttacagtacagggcatctaatactctgcagaaaagagcactgaggagccctttatcctggagttactgtcctgagagcttgtgcccccagagagtgagtgggtatctgccccagacccttttctcacttctgttctctctccacagtgggaagcacaaagtattttggcacagccaaagcccgctatgacttctgcgcccgagaccgatcagagctgtcgctcaaggagggtgacatcatcaagatccttaacaagaagggacagcaaggctggtggcgaggggagatctatggccgggtgaggcaggcagggctgggtgacggggagggcatgggggttgagctggtggtggacgagactggaactggggactggagaaggtgaggtgcggctcccatggagatctctcacggtgggagggaaggaagggacacagggatgtcatttatgcatttatgcaacctacctgcatgtattcagcacctgctgtgtgcagacattgtgctgggtgtcgaggagacagaaacaagcacggtacaaggattgccctcatgaaacttataatcgaatgtggaggacagacctataaccaagcagtcatgacactgagtggtcaagactaacaagggtgccagtcacggtggctcatgcctgtaatcccagtgctttgggaggctgaggtgggaggatctcttgaggccacaaattcaaggcaagcctggctaaaatagtgagatcccacctctacataaataaaaataaaaacaaaaacattagttgggcgtggtagtgtgtcccaggtactcaggaagctgaggtgggaggattgcttgagtccaggagttggatgctgcagtgagctatgattgtgccactgcagcctgggtgacagaacaagaccctgtctttaaaaaaaagaagaaagaataaaagagattgtggtggagaatcacagggcagcgtgggagcactgagggagcccctgacccaccctaggagtggatcaggatgacttctgaaaggccaaactgattaataagggataaataaagtcatgcaaatgaaaaggttgtatatgtgttgggggaaagcattccagacagaaggaccagtgtgtgcaaaggccctggggtgagaggtgcctaatcagtactgaatatacaaagaggtagagctgggactaaaccactgtgctcactttgcctgcttgaattccgattccaaggagtggaatagacttcaaatgtcttcaagtccacttgtttctgccaagttctcatttttgttccatgaaggcagagcaccttctttatttcatccactgatgacttctcagcctctagaattctgccttatgatggatttctcagaaatatgtttgtgtaatgaagacaaggacagtggttagagtttacattctactggggaaaatatacacaaaaaatgatgtggataattgcatcgatgaggagttttgttaaaacattggagggtcagtttaatgagcagtggaggacaattaggctttgagagaggcttttggagcattgaggaaggattgggatgtaaaggattcatccatccatccatccatccatctatccatccatccatctatccatctatctatccacaaatcatccattcatctgtgcatccatccatcttagcctatgcatccatccatttcaacctacgcatctatccattcatccacccacccttccactcacgcatctatctaaccatctatccacctacccacccattaaaacattaatctatccattaatccaccatccagccaacatctattcatccatttctatctgtgcatccatccatctatccatgcatgcacccatctgttaatctatctctatatttatccatccatacacctactcaccagtccattaattcatccatccatccatccgaccaccatccactcacccttccaatcaccattcaccaacccaagtatccatccacccattcatctatctatctatctatctatctatctatctatctatctatccattcattatctatctacctatctatccacctacccatcaatccaataatccatccattcatctatccatccagccaaaaaatattcagtaagtatctactgtgtgccaggaactgttctaggctcttgggattcagtgacaaataatacagacaaaaatccctgctggccaggcgtggtggcttatgcctgtaatcccagcactttgggatgccaaggtgggtggatcagttgaggagaggagtttgagacccgcctggccaacatggcgaaaccctgtcttaactaaagatacaaaaaaattagctgggcattgtggcgtgcgcctctaatcccaggtactcgttaagctgaggcaggagaatcgcttgaacccaggaggcggaggctgtggtgagctgagatcgcgccactgcactccagcctgggcaacagagtaagactgtgtctcaaaaaaaaaaaaaattctgccttgtagagctcacattgcagttgcagggaggggaacagacaaaaagcttgtaaataagcaaatgatacataatgaatcagacggtgatatgtgctatagaaaaagataaagcaagacaaggggtccaggcacggtggctcatgcctgtaatcccagcactctgggaggccgagatgggcagatcaccggaggtcaggagtttgaaaccagcccggccaacatggtgaaaccccgtctctactaaaaatacaaaaaaattagccgggtgtggtggcaggcgcctgtaatcccagctactcgggatgctgaggcaggagaatcacttgaacccgggaggtggaggttgcaataagctgagattgcgccattgcactccagcctagggggcagagtgagactctgtctcaaaaaagaaaaaaaaaaaaaaaagaaaagaaaagaaaaagaaaaggggctaaggagtgttggggtgggtggagcttgcaattttgaatagtatggctaggaaggtcttgctgataaagtgccatttagggagggacttttaggaggtaatgggtgtgtgtgtgtgtgtgtgtggtcagccttgtgtacgttgggtgatgtgttttctgggatagacagaaggaagagcaggtgcaaaggccctgaggtgggagggagcctgcctggtgtgtggaggggcagtaggaggatgtgcagaggttgcactgatgaactcctcgtctgtttccaggttggctggttccctgccaactacgtggaggaagattattctgaatactgctgagccctggtgccttggcagagagacgagaaactccaggctctgagcccggcgtgggcaggcagcggagccaggggctgtgacagctcccggcgggtggagactttgggatggactggaggaggccagcgtccagctggcggtgctcccgggatgtgccctgacatggttaatttataacaccccgatttcctcttgggtcccctcaagcagacggggctcaagggggttacatttaataaaaggatgaagatggatagaaggactggtgtcgttcagaaggacctgctaggagagagatggggagagagtgtgccacactgacaaagccccctcaccaatccacagacaaagcccccttaccaaccacagacaaagccccctcaacaatccacagacaaagccccctcaacaatccacagacaaagccccctcaccaatcacagacaaagcccctcaccaatccacagacaaagccctctcaccaatttctgtctcctaacttgattgctgttctctgtcatctattaatacaatacaacttgaatctgggatatgaaattccctcttttgggctgggcatggtggctcatgcctgtaatcccagcactttgggaggctgaggtgggcagattacctgaggtcaggagttcaagaccagcctggccaacatggcaaaaccccgtctctactaaaaatacaaaaactagccagtgcctataatcccaactactcaggaggctgaggcagaagaatcccttgaacctgggaggcggaggttgcagtgagccaagatcgcaccactgcactccagcctgggcaacagagcgagattccgtctcaaaaataaataaataaataaaataaaataaagcaggaatttgctgggtgcagtagctcacgcttgtaatcccaacacttcaggagattgaagcgggtggatcacccgaggtcaggagttcaagaccagcctggccaacatggtgaaaccccgtctctactaaaaatacaaaaactagccgggcgtggtggcaggtgccagtaatcccagctgcttgggaggctgaggcaggagaatcgcttgaacccaggaggcagaggttactgtcagccgagatcatgacgctgtactccagcctgggtgacagagcaagaactctgtctcaaaaaataaaaataaataaagaaataaataaataaaagtgagaatttcttttcttttttttttttagtactcaaagatttttatactcaggaaagaattttatactcaaagattcaagatcacaaaaatgtaccgctcattcgtttttctttctttttaaattattttattttattttttcagggacagagtcttactctgttgcccagccgggggcacagtggcacgatcatagctcactgcagcctccacctcctggtgtcaagcgatcctcccacgtcagcctcccaagtagctgggactaaaagcaagcaccaccacacccggctaatattttattttttgtagggagggggtgttgctatgttggtcaggctggtcttgatctcatgggctcaagcagtcctctcaccttggcctcccaaagtgctgggattacaggtgtgagccactgcacctggcctcatttgtttttctttttgagacagagtcttgctctgttgcctgggctagagtgcagtggtgcaatcttggcttactgcaacctccgccccccaggttcaagtgattttcctgccttagtctcccgagtagctgggactacaggcacgcgccaccatgcccagctaattttttgtatttttagaagagacagggtttcaccatgttggccaggctggtctggaactcctgacctcaggtgatccacccgcctcggcctcccaaagtgctgggattacaggcgtgagccacctcacctggccattttttatttaatagtctttattaattattaaaattgcagtaaaatatacattacatgaaatttattttcttaagctttttttttttcttttttttttgagacggtgtcttgctctgtcacccaggctggagtgcagtggtgcggtctcagctcactgcaagctctgcctcctgggttcacgccattctcctgcttcagcctcccgagtagctgggactacaggcgcctgccaccacacccggctaattttttgtatttttagtagagacggggttttgccttgttagccaggatggtctcgatctcctgacctcgtgatgcacccgcctcggcctcccaaagtgctgggattacaggtatgagccaccacgcctggcattttttttttttttttttttgagatggtgtcttgctctgtcacccaggctggagtacagtggcgcaatctcggctcactgaaacctccgcctcctgggttcaagtgattctcctacctcagcctcccaagtagctgggattacaggcacccgccaccacacccggctcatttttgtagttttagtagaaacggggtttccccatgttggccaagatggtctcgatcttctgaccttgtgatcgaccagcctcggcctcccaaagtgctgggattataggcgtgagccactgcgcccagcccttagacttttaatgctcataaactaagattcaggatctccaaggaagattttgaagttcaaaagccagggaggctgagggcagaggattgcttcaggccaggagctcgagaccagcctgcacaaaatagtaagatcttcctctctacaaaaaaaaaaaataaataaaaaaataaaaaaaataaaaaaattagctctgcatggtggcacacaactgtagtcccagctactcaggaggctgaggtgggaggattgcttgagcccaggaggtggaggctgtggtgaactatgattgcaccactgcactccagcctaggcaacagagtgagacctcatctctaaaaaccaaccaggccagtcacagtggctcacgcctataatcccagcactttgggaggccgaggcgggcagatcacttgaggtcaggagtttgagaccagcctggccaacatggtgaaatctcatctctactaaaaatacaaaaattagccgggcgtggtggcaggtacctgtaatcccagctacttgggaggctgagataagagaatcacttgaacctgggagggggacgttgcagtgagatgagactgcaccgctgcactccagcctgggtgacagagcaaaactccatctcaaacaaaaacaaaaacaaagaacaaaaaacaaaacaaagcaaagaaacaaccaagtaaccaactgaccaacaaaagccagggagttgctttttgggtaaatctgcaggctgctagcataacccttaggaggcaaaaagatgggctggcctaagctgacagggctggggaaggatcatgggctataaattaatttgggaaaaagtagttcatacttccaaatatattaccctaccatactactaacagaggcacctcccgtgtcaagtattcagtgttgtctggcgccatgaaagtaagcacttcctacacagtatctagattaatctcacagccagcttcgtggtattttatcttattttattatttattaatttatttttgagatggagtctagctctgtcgccaggctgcagtgcagtggtgcaatcttggctcactgcaacctccacctcccaagttcaagcgattctcctgcctcagcctcccgagtagctgggattacagacacacgccgccacacccagctaacagttgtatttttagtagagacacaggggtttcgccatgttggccaggatggtctcgatcttctgacctcgtgatctgcccacctcagcctcccagagtgctgggattacaggcgtgagccaactgcaaccggccgggtttctttttgttgttgttgttttttttgtttttgagacggagccttgctctgtcgcccaggctggagggcagtggcgcgatctcggctcactgcaagctccgcctcccgggttcacgccattctcctgcctcagcctctcgagtagctgggactacaggtgcccgccaccacgcccggctaattttttgcatttttagtagagatggggtttcatcgtgttagtcaggatggtcttgatctcctcgccttgtgatccgcccgcctcggcctcccaaagtgctgggattacagacgtgagccactgggcctggccagtttttatttttatatgaaatagagcatagtggtcagggctccaagagattctaaggtcctctgtgcccctgtgaaattagctataaagttttgggaaagacttcgcctctctgaaccagagaaagataaaatcagctcgccacaggcagagagtcggtatgcacctaagcacagaaccacgctcttaaccgtcactctagtgccgggtggggatcttggtatatcctagctctctctgcaaccccaggtaagccaacgcctagatggtacctgcacacacctggccaggtgcaggatatagcctctgaagcctggagtgaagtgtttttcatgtttgaggaaccatgaatctagaaatgggtgttggaggaagcaatgcagtcacaagggatcaggaactaggacggggggtttctgcccctcccgtgactcccccagagtcacaccatgaacctacctatggcctaaggtggctacctgggctgtctagttcagggtgttggtgaggttgaggtcatggacttgttcttggagttcctgggtggccctcaccttcagccccaggctgtgtgaatgactcaggcgcagacctgcctgaaaagcacgtataatccagtaggggacttaacaatcaaccaggcaattataacacagagttgatgaatttcataaggaacacaggtggctgtgggagcaaatacagatctaacccaggcttgagtaggggaggatggtcagggagggcttcctggaggaggaaacatctaaggtggcaactgtataatcagctggatggagtcacctagaaaataaatgaggggacagcctagcacggtggtccatgtctgtaatcccggcacttggggaggccgaggcggcggatcacttgaggtcaggagttcgagaccagactgggcaacatggtgaaacccccatctctactaaaaatacaaaaattagccggtgtggtggcaggtgcctgtaatcccagctactcgggaggctgaggtaggagaatcacttgaacctgggaggcagagattgcagtgagctgagattgcaccactgcaccccagcctggacgacagagtgagactcaataataataataataaataatgaagggaaagttttttagggagaggggcaaatgatagtgatcctggtaggttctggaaacttcaaggggctcattttgcttggagagggaggaaagtgggggtggggtgggtgaaaagttgttgggagaccgggcgtggtggctcatgcctataatcctagcactttgggaggccgaggcaggtggatcacttgagctcaggagttcgaaaccagcctggccaacatggtgaatgtacaacggacagcccccaatacagacagacagacacacacacacacacacacacacactcactcactcctacccccagccctaagaatttacaaacactgataaagacaaatgaaatcagcggatatagacttcaaacgccgtcagacagacacccactagatcaaacagggacattcctaaacatcacacagacacatcgccaggcagtcccaccgcagacagccacaaattaaagccgcgcttgccccctgatggacagcagcagtagtgcgccacctcgatagcgcaatctcccagagcgctggcattgcaggcgtgagccaacgtccgcagccaaacacgttcatattgttgagaaggcagagaaatacaaagtaggtggaagggtctccacctacagctgttttctgtggtctgaggattcttcccacgtctttaatttctagtgctttctaggggtctcaacttgaactatttaatattttctggaagagaaacattttttgtggggggggcgggtgggggtgggaccgagtctcgctcttgtctcccaggctggagcacagtggcgcgatcttggctcactgcaacctccgcctcccaggttcaagcgattttcctgcctcagcctcccgagtagctgagattacagcgcccagctaatttttgtatttttagtagagatggggtttcaccatgttggccaggctggtctcgaactcctaacctcaggtgattcgcccgcgtcggcttcccaaagtgctgggattacaggcgtgagccaccgcgcccggcccagaggaactttttttttttttttccagaggaacattttttatccaaaggaatgactccctaatggtggaattccaggcaatgaagtgaggcgcgaggcagattgtcacatagggagctgtcatatttcatgggtaccattcacgcaaggcgggacttgttcttaggcagccaacacttccgcattgtcctggcatttgagccgcggaaccaagttccgcgtatcttgcccattgtaaccccacagcaccaatttgaagctatgtagtgccctctggtggccttcggtgatttggcttcagtgtctcaaactctctgattagactgtttccaaagagaaggctgttagggggcctcagaagtcaggtttggatgtttgagctctaagctgcaggatttggggagccgtggtgtgggggtgatttatttatttatttttgagaaagagtctcactctgtcgcccaggctggagggcaatggtgtgatcttggctcactgcaacctccacctcccaggttcaagtgattctcctccctcagcctcccgagtagctgggactacaagagcccgacaccacgcccagctaatttttgtattttcttttgagtagagacggggtttcaccatgttggccaggctggtctcgaactcctgacctcaggttatccacctgccttggctttccaaagtgctgggattacaggtgtgaaccatgcctggccggagtggggatgattcaaacagtggatattcgcatagaatgtgcccattcctatggtgtaaatagtcccaccgcatctgatttcttttttcttcttttttttttgttttttgtttttttgtttttgagatagagtcttgctctgttgcccaggctggaatgcagtggcacaatctcagctcactgcaacctccacctcctgggttccaagcagttctccctgcctccgctgcctgagtagctcgattacaagtgcccaccaccaagcccagctaacttttgtatttttagtagagatggggtttggctgtttgccaggctggtcttgaactcccgacctcagatgatttgcccgcctcggcctcttacagtgctgggattacaggtgtgggccaccgcacctggcccacagctgatttcaagtcatcataagtatcctcactttccttgcctccagtccacccagcaaaagcacaactaacatcagagagctcaggcacggggataaccataaggtcctatgtaatctgcatctcccttcctgccttggccatgctggccacaggcagcaggaaggggcagaggaaggagctgggcgaggatgtggcctcagctggagtttacttagagattagctccatggagaaaaataaagtggagtaacatgctagcaagtttttatttaaaactttaaaaataaaaaagtttttgaggccgggcatggtggctaatgcctgtaatcccagcactccgggaggccgaggcaggcggatcacaagggcaggagatcgagaccatcctggctaacacggtgaaaccccgtctctactaaaaatataaaaaattagccggacatggtggcaggcgcctatagtcccaactattcgggcagctgaggcaggagaatggcgtgaacccgggaggcggagcttgcagtgagccgagatcgcaccactgcactccagcctgggcattacagtgagactgtctcaaaaaaaaaaaaaaaaaaagaaaagtaaaaaaagaacagaatgctttggcatatttaaaaatggttcctgccgggcacagtggctcatgcctgtaatcccagcactttgggaggctgaggcgggtggattacgaggtcaggagatcgagaccatcctggctaacacggagaaaccccgtctctactaaaatagtacaaaaaaattagccaggcgtggtggcgggcgcctgtagtcccagctactcgggaggctgaggcaggagaatggcgtgaacccaggagacggagcttgcagtgagccgagatcgtcccactgcaccccagcctgggcgacagagcgagactctgcctcaaaaaaagaaagaaagaaagaaagaaagaaagaaagaaagaaatctagccccttcctcagggccgagagaattttgagcactagccttctctcggtcgcctgaattcatctcagagtgtggcatttctctgcaactcactcggttacaacacggggtgtggattattcaggagtgttctgggaaggggttgaggattttccagaactaagggttcctcgcctttctagactctctaggatagcttccggacattgccatggcatctgtaaactgtcatggcgcttgcgggagtttcttttagcagctaatacatgataattagtgtataataagaatgaacaatgaggacaaccacaggtcagttttgtcgccatcttggttttggtgggatttgggctggcttctctaccgcagcctgtttaatcagtagggtctttatgacctgtatcttgtgtcgacctcctatctcatcctgtgactaagaatgcctgatctcccgggaatgcccagcaggtcgcagcctcatgttacccagctcctgttcaagatggagtcacactggttcaaactcctctgacaagtttgtaaaacttatgaaactgcgggggctgccctaagacttctgcacactgagtcttgagcgattcgtcaattaccgttcaggtttttctaccccggtactggttcctgaggtgttttctgctccagtaaaccgacactctctctctgactctccaattcataacaaaacatttcatgacacgaaacacaaacatacataaaatgtactttttttttttttgagatggaatctcactctgtcacccaggctggagtgcagtggcgggatctcagctcactgcaacctctgcctcccgggttcaagcaattctcctgcctcagcctcctgagtagctgagattacaggcacgtgccactatgcctggctaattttttgtacttttagtagagacgggtttcaccatgttggtcaggctggtctcgaactcctgacctcatgatccacctgcctcagcctcccaaagtgctgggattacaggcgtgagccaccatgcccagcaaaatgtacctcttttaccattttctttttttgagataggatcttgctctgttgcctgggctagagtgtagtggcacgatcacagttcacttcaggctcaacctcaccaggctcaagcgatcctcctccgtcagcctcctgagtagcttggattacaggcaccagacaccacacccagggcagctgtttgccctgtgtccttgtaactacccagtgggttcaccttgctctccgcctagacagagtcaatttctcaagacaggaattgcagtagagaaagagtaattcacacagagccggctgtgtgggagactggagttttattaatcaaatcagtctccttgagctttctgggagcagagcttttaaggacaacttggtgggttgggagaagccagcgagccaggagtgctgatcggtcatggatgaaatcacagggagtcaaagctgtcttcttgcactgagtcagttcctggtgggggaccacaagatctcatgagccagtttatcaatctgggtggtgccagctgatccatcaagtgcagggtttgcaaaatatctcaagccctgatcttaggagcaatttagggagggtcagaatcttttagcctctagctgcatgcctcctaaaccatcatttctaatcttggggctaatttgttagtcctacaaaggcagtctagtgcccaaacaagaaggaggtttgttttgggaaagggctgttatcgtctttgttttaaactataaagttcctcccaaggttacttccgcctatgcccaagaatgaacaaggacagcttggaggttagaagcaagatggaggccaggcgcggtggctcacgcctgtaatcctaacactttgggaggccaaggcaggtggatcacctgaggttgggatttcgagaccagcctgaccaacatggtgaggtgagaggatggcttcagcacaggaggctgaggctgcagtgagctatgattgtaccattgcactccagcctgggcaacagagcaagaccctcatcccaaaacaaaagcaaaaataataataataataaaccccaaccctcacccagtctgtagtacttagttatggcattcctaacagaccaatacagtgaaactaggtctatcgccagaaaagcccattctgtgggctaacagaatatattgtcccttatttttttattttttttgacagagtatcgctctgtcacccaggttggagtgcagtggtgtgatcttggctcactgcaacctccacctcctgggttcaagcaattcttctgccttagcctcctgagtagctgggattacaggcatccaccaccatgcctggctaatttctgtatttttagtagagatgtgttgtcaccacattggccaggctggccttgaactcctgacctgtgatccgcccacctcagcctcccaaagtgctgggattacaggcatgagccaccgtgcccagtctattgcccgttatttaggctgtatctttgtgtagctcctccacttcccagaaccctctatcttctcagaggcttaggcctggagatccattttctttctctagattctttgagacccacttccttcaaattcagctccccgtctgcctggtctcaggggccctatctttggggatgaataagatgatttattatttttttcttcagtcattttgcactttcacatattcttctgggtcatcttctcataatgtccaaagacagtctagactatcagttcctctagctggttcttctgccccctgtgagatgcaaggataagtaaaaccattcggggaactggcttggagctcagccagaaacccttgcagaaattggcagagggagaatctgtgcacagcaacgcttgcagacgttaggtgtcccttgcaaagggagtggataaacacacagctgcccactgtgtaagttcaccagcctgtgccccgagctctaaacaggactggggaaaggtttccaagatgtatttcttatcagcagcctgcagttaggaaacaaaaattgcaacagtttttgttgctttattttagtttttaaggaagtatatggttagattgttgctaaggtttataaggtcatatgtctttttctttttttcttttttcttttttgagatggagtattgctctgttgcccaggctggagtgcagtggcatgatctcagctcactgcaacctccacctctggggttcaagcaattctcttgcctcagcctcctgagtagctgggattacaggtatgcaccaccacactcggctaatttttgtatttttagcagagacagagctccaccatgttggccaggctggtctcgaactgtgggcggaggattacctatgtgccgagtcaagagactgaaggcacaaactgtttcagtataataaagaaaatagttagaatagtcataatacaagttagatatagagatgatcatgaacagttattaatcattattataaacattaatcattagcttttaatattactctttgttgcattactaatataacctaggaataaccggcggatatagggtcaggtgctgaagggacattgtgagaagtgacctagaaggcaagaggtgagccctctgacatgcccgcataagggctgcttgagggctccttggtcaagcggtaacgccagtgtctgggaaggcacccgttacttggcagaccgcgaaagggagtctcctttccttggaggagtcagggaacgctctgctccaccagcttcttgtggaaggctggatattatccaggcctgcccgcagtcatccgggggcctaaacccctccctgtggtgctgtgcttcagtggtcactctccttgtccactttcatgctcctccagtactcctggttcctctttgaagttcacagtagatagtggtagcagaaatagtgaaagtcttaaagtctttgatctttcttattagtgcagagaagaaaacgctgacgtatgctgccttctctctctgctacctaaaaggtaagggccccctatcctgtcatcatcctgtaatcacgtgacttgcctcaccttgtcgatcacttagaagattcaccctccttaccctgcccccttgtcttgtatgcggtaaatatccgcgtgcgcagctgttccgggctactaccagtctccgcatcttgatggtagtggtcccccgggcccagctgctttctctttatctctttatcttgtgtctttatttattacaatctctcatctccgcacacggggagaacacccgctaagccccatagggctggaccctacattgaactcctgacctcaggtgattcacccgcctcggcctccgaaagtgctgggattacaggcgtgagccaccgcacgcggctggtcacatgtcttcaacattgtgcaatgagatcaactctatattaaaagaaatttaagagatcacatttcattggagatgtacaaaaccaatgtcattaggtccctttatatggcacacacaataaaacaatttgattcctccatttagcaggcagcataaaataatttggttgctttgtagaacatgcactgacgaataacgtggtcccctcatgcagaatgcaccataaaataattggacaggatggtgggtgctgttttattttggggcctattttatcaacttcattgaggaataatttgtgtacaacaaatggcatgctttggcagtgtacaatgtgatgttttgacaagcactgttaacaatgctacagtaaaaatatggatcagtccgggcacggtggttcatgcctgtaatcccagcactttgggaggccaaggtgggcagatcgtttgaggtcaggagttggagacgagcttggccaacatggtgaaaccccgtctcgactaaaaatacaaaaattagctgggcatggtggtgcgcgcttgtaatcccagctacttgggaggctgaggcaggagaattgcttgaacccaggaggcagaggttgcagtgagccgagattgcaccactgcactccagcctaggcaacagaataagactccatcttaaagaatatacatagatcatttccatcattcccctaagtcccctgggaccctcttgtaattcatccttccctccaccccggccctaggtaaccactgatttgctttctctacccctaaccatatatggtttgtgttttctagaatttcaaatacatagagtggttaattttatatgtcaacttgtctagactgtgggaaggtatttttaagctatgattaatgtttatagtcagttgactttcagtaaattagatgactctctataaagtaagtgggccacttctaatcaattgaattccttaggagcaaagataggtttcccgaagaagaaggaattctgacttcagactttaacatagagatatagaaattctgcctgtgaattgcaacaaaagcaaaaattgaccaatgggatctaattaaactaaagagtttctgcacagcaaaagaaactgtcatcagagtgaacaggcaatggccggacctggtgactcacgcctgtagtcccagcactttgggaggctgaggagagtggatcatgaggtcaagagtttgagaccagcctggccaacatggtgaaaccctgtctttactaaaaatataaaaattagcggggcgtggtggtgggtgcctgtaatcccagctacatgggaggctgaggcaggagaattgcttgaagctgggagaaggaggttgcagtgagccgagattatgccactgcactccagcctgggtgacagagcaagactccatctcaaacaaacaaaaaattaactgggcatgatggcacatgcctgtagtcctagctactggggtggctgaggtgggaggatcactagagcccaggaggctgaggctgcagtgccgagattgtgccactgcactccagcctgggcaacagagcaagactctgtctcaaaaaacaaaacaaaacaaaaacaaaagcaacaaacaaacaaaaaacgagtgaacaggcaacctacagagtgggagaaaatctttgcaatttatccatctgacagaggtcgaatatccagaatctacaagaaactcaaacaaatttacaagaaaaagacaaacaacaccattgaaaagtgggcaaaggacatgaacagacacttctcaaaagaagacattcatgcagtcaacaaaaatatgaagaaaagctcaacatcaatgatcattagagaaatgcaaattgaaaccacaatgagataccatctcatgccagtcagaatgaccactattaaagagtcaagaaacaatagatgctggcgaggtggcagagaaataggaatgtttttacactgttggtgggaaagtacatcagttcagcccttgtggaagatggtgtggtgattcttcaaagatctagaaccggaaataccatttggcccaacaatcccattactgcaaatatacccaaaggaatataaatgatactattacaaagatacatgtatgtgtactttcattgcagcactactcacatagcaaggacatggaatctacccaaatgcccatcaatgatagactggattaagaaaatgtggtacatatataccatggaatactatgcagccataaaaaggaatgagatcgtgtcctttgcagggacacggatgaagctggaaggcattatcctcagcaaactaacgcaagaacagaaaaccaaataccacatgttctcacttatagtgggagctgaaaaatgagaacatatggacacagggaggggaacaacacacactgaggcctgtcagggggtggggttgggagagggaaagtattaggaaaaatagtgaactcatgttgggcttaatacctaggcgacagattgatagctgcagcaaaccaccatggcacatgtctacctgtgtaacaaacttgcacatcctgcacatgtaccccagaactaaaaatacacatttaaaaatgtttttaaaaagaaacaaggctgggtgcggtggctcacacctgtaatcccagcacgttgagaggccgaggtgggtggatcacctgaggtcaggagttcaagatcagcctggccaacatggtgaaaccccatctctaccaaaaatacaaaattagctgggtatggtggcacatgcctgtagtcccagctactcgggaggctgaggcaggagaattgcttgaacccgggaggcggaggttgcggtgagccgagatcacgccatggcactccagcctgggcaacccaagagtgaaattccctctcggggaaaaaaaaaaaaagaaaaagaaacaaagctgggtgtggtggctcacgcctgtaatcccagcactttgggaagccaaggtgggtggatcaccttgaggtcaggagttcgagaccagcctggccaacatggtgaaaccccatttttaatctctactaaaaatacaaaagttagccgggcgtggtggtgcatgcttgtaatcccggctattcaggaggctgaggcgagagaatcgcttgaacccaggaggcagaggttgcagtgagccaagattgcgccattgcactccagcctgggtgacagagtgagactctgtctcaaaaaataaataaaataaaataaaataaattttaaaagaagaaagacattttgcctgtgctttaagcctttgggcccaagactgcagtatcacctcttacctgaatctgcagcctgtcagattgccttagggatttcggacttgtaacccctacaatcccgtgagccagttccttaaaatcactctctctctctttctgactctctgtctccctctctctgtctctctgtttctcctcttagttttgtttctctggagaatcttggataatacaagatccttttagtttattccctctttgtgtctggcttcttttctgtcttttttcaaaaatttgcatgaatgtatgaggtacaagtccagttttggtacatggattactgcttagtggtgaagtctgggcttttagtgtagccatcacccgagccatgtacattgaacccactaagtaatttctcatccctcactccccttccacccttccaagtccccagtgtctattattctacactctacgtccatgtgcacgcattatttagctcctatttataagtgagactatgtggatttgactttctgtttctgagttgttttatttaagataacggccttcagttccatccaggtgttaccaaagacatgatctcattcttttttatggctgagtagtattccacagttcatatatgtggggggttcagtcagagtggttggaaaaactataaggaaaggactcaaaccttctgaaagtttggaaggttctgcagagccccgggggaggaatagctgaaggcagctgttctataaccctgaggcagagggcaaggagtaggtacaagggagtgtgggcgaatttatcttaagcaggcctgtttacttacgttgaccaggaactgacttttgatcatctgcctatgtgatgttccctgaaaggggagcaataaatgttaattacctacaggttgtgtgtactccatgtttttggcattgtgcccacactgaacaaatgcaagcagctccagcttctcggggctgctctctggccgctagagccaggcagtcacctggctgctcttacactgcatacctgtgtctgactactcatttcatcccatcggccagggtctgcgggacagacccagtacacatacaccacattttctttatccagttgtctgtagataagacacttggactgatttcatatctttgctcttgtgaatagtgctgtgataaacctacaagtgtgggtatttttttgagaaaatgatttcttttcatctgggtagagtgggactgtcagaacgccttctcaatttttttctttttttagagatggggtcttcctctgtcactcaggctggagtgcaggggtgcaatcatggctcactgcagcctcaaattcctgggctcaagcgatcctcctacctcagcctcccaagtagctgggactacagacttgtagtaatttttgtatttttagtagagacggggtttcaccatgttggtcaggctagtctcaaactcctgacctcaagtgatctacccacctcggcctcccaaagtgctgggattacaggcatgagccatcacacctggctccctcttctgactttttgctctgtatcctttcactgtaacaaatcataaccattagcaagactatatgctgagtcttcttagagaatcattgagcttggggaggggggtctccgggacgcctgataaaccacccctacctttaaagaaagagccttaggagccatagataaaccatgaagtctttggaggacaatgaagtctttgcatccacctccctcttagaaaccctgattcttttctcctgcaaaagggcagctgctgttcatttctcaccccctcaagaattgtggtcttccttctggggaagcggggtagggatgcaaagttcagtagattcatctatttctcttcccttctttttcctcatttgtttctttattttctaggatacaacagccaatgaaattctttccctgccctgagaaaatgctcagttttttgagggaaacagacattcaagcaagcatagataatactgactatggtgatggggggggaggatggaggaggcgcctcactctcaagtggaagtcaaggaaggcttcctggaggaggtgatatttacacagaaaggttgtataggattggggtgaatgtgcatttcagacttggtgtcaagagagaactgggtttggtggcacatgcctgtaatcccagcactttgggaggctgaggcaggaggatcgtttgagcccaggagtttgagaccagcctgggcaataaagcaagatctcatctctaaaagagaaaaaaaaaaattagcagggtatggtagggtatgcttgtggtctcagctatttaggaggctgaggtgggaggattgcttgaattcaggcagttgaggctgcagtgagctgtgactgagccgttgcactccagcctgggcaacagagcaagtccctgtctcaaaaaaaagaaaagaaaaagagagagagtttgaagtagaacttgctgtgaggtttcttgtgcacaggtgtttttgagggagaagatcaggacagagcaagggaatgagctaagcaaggaagtggtcttagctggagtccagccttagccggatcccatggggagccctggagtgtgactggtgccaccaggttggtctcaccctgggggcatggggctggccttctgcacctctgtgaccatccgttatggctgtgggctgggtctgagggtttgcacagttgctcagctgaggagaagggggaagctgtgagctatgagctattgtaggcagcactcactcacagcagccccaggatgggtgcaccagcctgggaaaggtcagtgagcagagcgttgactgcacccacaacagggacttcaagtattttataatcactggggggctttttgttgttgtttttttgagacagggtctcactctgttgcccaggctggagtgtactggtgccatcacggctcactgtgaccttgacctcctgggctcaagcaatcctcccgagtagctgggactacaggcatacaccactaggcctggcttattaaaaattttcttttatagagatggggtttctccatgttgctcaagctggccttgaactcctgggctcaaacagtcctcccaccttggcctcctgagtagctgggaccacaggtgtgcaccagccactatgcccaactaattaaaaaaaaatttttttctgtagattcaggatctcagtatgttgccttgaactcctgggctcaagcgatcctcctgccttgatttcccaaagtggtgggattacaggcatgagccactgtgtctagctgatcactagggctttagggggagtggagatcaataaaacaagatggggagaccagagtcagactacgtagagccttgagtgccatattaataagcctgaacttcatcctgagggcaatagggagccatggaagggtttagagtctaagcagggcgtggacaggttaggcagggattccccaacttccctgccccttcccggcactctgtgtgacggtaagtgatgttcctgcagctccccaggctgatttcttcaatcttgagagtcccttgtattcccctttgctagggaagtcattaggggttagattttgtaagcttcttggccagaattgttgatttcctcttccacatctttccccttcctgttcttacacccccacccgcaactctgcagggccgctgcaggacagtctttatatagcttcggtcacctctgtgggtttgaagggtgtctggagtcttgggttttcagtgtctcactaggacccgataccctgcctgtggtaggtgggataaagggcctcctctccctccacgaggcacctacagcctaatccctaaagcccaaggatgtgttcccttctatgacaaaagggacttttgcagatgggattcagttaagggctatttttttgggggggaggtggggggagtggggacagagtcttactctgctgcccaggctggagtgcaatggcacgatctcagctcactgcaacctctgcctaatgtcattacaagaattcttacgagaaggagacaggaggatcagggagagagagagagatggagagatagagatacacagagagtgagagagagagaaagaatgagagagaacgagagagagagagagagaacaagagcaataaggagagtgaacaagacagacagaatgggccaggcgcagtggctcgcgcctgtaattccagcactttgggaggccgaggcgggcggatcacttgaggtcaggagattaaggccagtctagtcaatatggtgaaaccccatctctactaaaaatacaaaagttagccaggtatggtggcagatgcctgtaatcccagctactcgggaggctgaagcaggagaatcgcttgaacccgagagacggaggttgcagtgagccgagatcgtaccactgcactccagcctgggtgacagactgagactctgtctcaaaaaaaaaggagaaaaaaaaaagagagaatgaaagagcaagagggagggaaaaatgagagaataagcaagagagagaacttgagagagagacagacagagaaaaagagagagaatgagagagcaagagagagggaaaatgagagagagagagagagcaagaacgagagatttagagtacgcaagagacatttgaaactgctagctgctggctttgcataggaaggaagggaccatgagccagggcatgtgggttgcctccagaagccagaaaggacaaggaatggattctgccctggagcctcgggaaggattgcagccctgctggcatcttggttttagtcccatgagactcgagaggactctgacctctggacccatcatatactaaatctgtgttttccccaagctgccaggtccgtggcaagcctcatcccatccccatccccagaagggatctgggtttgattgcaaaaccttccaactctttagcccagcctccaaatgtcgaatccttcttctgtctcaaactcccctgctacatctagacagtccccaaattcggttgttcctgcctcctaaattctccgtcactatagcccctgccccagaccaggccactgttctcttctctctcctggctgtatccccagcctcctccctatctgcccacctgtgaacccatcctgtccaatacccacctacaaaacacaaacataaaattccaacctgagcctgtggctcctttgctgaacctccttttattgccccgagggtaaagcctaaactctttcacccaccttataaggttctgtctgatatgaaatttgctggcttctccaattcaaattttgctggtatcaggattttttctatgagtagctgcaactatttagcatggtggaataataataataccaataataactaatagtatttaagcatttaatctgtgccaggcacagttttattattgtatcaccttaaccctcaaactccatgaagttagaccctttatttatttatttatttatttatttttgagacagagtctcgctctgtcacccaggctggagtgcagtggtgtcatcttggctcactgcaacctccgcctcccagattcaagtgagtctcctgcctcagcctcccgggtaactggaactacaggcgtgtgcccccatgcctgcatagttttttgtatttttagtagagacggggttttaccatgttagccgggctggtctcaatctcctgacctcatgatccacccgccttggcctcccaaagtactgggattacaggcatgagccaccacacctggccctagttagacacattattaccctcattttattaatggtgaaaactgcttcttaggtgtattggttatctcttgctgtgtatcaaattactccaaaacttagcagcttaaaatagggaacttttagtctcttacagtttctgaggatcaggagtctgggggtggctgagctgaataattctggctcaagctcttgcttgaggttatagtcaagccattgaccagggctggctcatctgaaagttcgactggggtgggaagatttgcttccaaggcagctcactcacatgactgttggtgggaggctcagttcctccacagcactgcttgaatctccttacaacatggcgactggctactccccagtgcatgaccctggaaagagagagcaacgaggatgccacaatggcacgtatgacctagtcacaaactgtcatgtgctcctttttctgatcaatagaaacaagtcacactgggcatagtgtctcatacgtgtaatcccagcactttgggaggctgaggcaggaagaccacttgggcccagagttcaagaccagcctgggcaacatagcaagatcctatctctgcaaacaaacaaaaagtcagctgggtgtggtggcacatgcttgtcatcccagctacttgggaggctcatgtaggaggatcacttgagcccaggacttggaggctgcaatgagctatgatcatgccactgtactccagcctgggcaacagagcaaaattctgtcttaaaaaaaaaagagagagagagagagagagagaaacaagtcactaagtctatgttcaaggagagagggattagtctctaccacctgaagagtatgaaagaactgatggatatgttaaaaccaccacattggtcttcctgcctctagagtccacactcctggatacactgaacaaggattataggagaaagtgcaagcctctggcagtcacttctagtagataacattacctgaaagggaattatggggggaggaggagagcgaggaccaatatcaccaggggatgggaggtgggaggggagagctacatctgtggtctctgcagagcagacacttttccagggaaacccttttctttctaatctttgtgagtcccccagtggatatttgtgtatctgagacctatgagatactcgtcctatgagacctcataggacgctgagaccccacattcagcattctatgatcaggagcatatggagaagatgtgggtgcagagacattgctcaaagaatacaaagtttcagttgaacaagaggaatatgttcgagagatctattgtacaacatggtgactgtagttaataacaatgaacaatgtagcatatccttgaaaattgctaagagggtagatgtaactattcttaccacaaaaaaatgacgtgcatgcaaaggaacagataggtttattgcctcgatttagccattccaccacatatacgtatctcagaacaccatgttgtacaccataaatatatacaatttaatttgtcaattcaaaaaagaattttttttttttttttgacagagtcttgctctgtcgcccaggctggagtgcaatggtgcagtctaggctcactgcaacctctgcctcccaggttcaagcaattctcctgcctcagcctccatgtacctgagattacaggcacccaccagcacacccagctaatttttgtatttttagtagagacggggtttcaccatgttgaccaagctgatctcaaacccctgacttcgtgatccacccgcctcggcctctgaaagtgctgggattacaggtgtgagccactgtgcctggcccaaaaacggaaaagaaaaaaagagagcacatagacctcacatattaactaggggaaataagaagtcaaaataaaccaaggctcagaagccaacgaattagagctggtgtttctcataggtctcagacacccaaatatccacctgcaggcttttttttttctttttttttgagacagggtctcactctgtcacccaggctggagtgcagtggtacaatctcagctcactgcaaccttctcctcctcccgggtttaagcgattctcctgcttcagcctcccaagtagctgagactacaggtgtgcaccaccatgcctggctaacaaagattgtaaagaaaaggatttccctggacaagtgtctgctctgcagagaccacagatgtagctctccctgctcacctcccatcctctggtaacattagtcctcgctctccttctacccccagaattccctttcgggtaatgttatctactggaatggactgccagaggcttgcactttttcctataatcctggactctggatacagcgtggaacagaaaaatgtagaaggaagctgggtgcggtggctcacaccagcaatcccagcactttgggagggtatcgtgggaggattgattgagcccaggagttcaggaccagagaccagcctgggcaacattaccagactccatctctaccaaaaagtgttaaaaaaaaaattagccaggcatggtagcaggtgcctgtagtcctgctactcaggaggctgaggtgggaggactgctgaagcccaggagatggaggctgcagtaagctgtgattgcaccactgcactccagcctgggcaacagagcgagactctctaaaagaaataaaaattttttaaaaatttaaaaattacagagggggccgggcctggtggctcatgcctgtaatcctagcactttgggaggctgaggtgggtggatgacaaggtcaagagatagagaccatcctggccaacatggtgaaacccttctctactaaaaatacaaaaattagctgggcatggtggcatgtgcctttagtcccagctacttgggaggctgaggtgggagaattgcttgaacccaggaggcggaggttgcagtgagccgagatcgcgccactgcactccagcctggcaacagagcaagatttggtctcaaaaaacaaacgaaaaaattgcagagggaatcctagagctgtggaagtctggataggtgccctcttcagacagcagcttctttcaaacttaatgaggctttgcacatgctttattttatttttcttttgtattaccttttctgctaagtgtgattatctcctgctcattctccagggctaagcttagacgttagctcctttgggaggccattctctcaacccccaacctgggtcaggcctcctctggccaagtaatagcttcctcacctctggctttctgtatcttacaatggggaggacaatcctgtcttttccccagcaaccctggggtgttgggcgtgtggacatcatccatgcctgataacaataccaaccatctcaaccaagggaaatgagaagtcaaaagacaccaagagtcagaagccaacaagttagagctggtgtttctgtttatggagctcatggcaggcactcacctgccgcatatgctgagcggtttccagcatccctacatgctcaaggatcctgtgggacagggctgatcattatccctattctcctgataagagactgaggctcagagaggtgaatcacctcctgtggtcactttggaaataccttacagagtcaggatttgaacccatggctgtctgagttcagttcctgtcactgcaataaccaacacttggaacgttgggtgccaggctctgttcttggtatgccatatatactcactcctctgatgcccacaccaggtccatgaggcagatcctactcttttttttttgagacagagtcttgctctgtcacccaggctggagtgcagtggcacaatctcagctcactgcaacctccacctcccgggttcaagtgattctcctgccttggacttccaagtagctgggattacaggcacgtgtcaccacgcccagctaattttttgtagttttagttgagacgggatttcaccatgttggccaggctggtctcgaacttctgacctcaagtgatccacccgcctcccaaagtgttgggattacaggcatgagccactgctcctgggtgagatcctattcttaatgcgcccattttacagatgagaatatttgaggcaagcagtggaggtgggatttgaacctctggcaatatgtttccagagttcatctccagtgcttccggaaaccacaatgcagctctgtttgtaccccttcctggtggaatttactgtattttcatgctgactcttaagttcagcctctccaggcagtgtcccttattttccccttaagaaaaaaaaaaagtgcaactggctgtcagcacttacttaattttacataaacaccctttttggggctgaagcaaatctgacttcttttcttttttttttcttttagaaaaacacactttattcatatttctttggggttttgttttgttgttgttgttgtttttgtttgttttttgagaccaagtcttgctgtgtcacccaggctggagtacagtggtgcgatctcagctcactgcaacgtctgcctcccaggctcaagctattctcctgcctcagcctcccaagtagctgggactacaggtacgtaccaccatgccgggctaatttttgtatttttagtagagacagagtttcatcatgttggccaggctggtcttgaactcctagcctcaggtgatccacccacctcggccttccaaagtgctgggattacaggtgtgagccaccgtgcccagccaaatctgactgattttcaatgtgaaaataaaatataaaaacagttcttggagttatttctaaccagaactaacatcagaatcgtcaattttggaaaaattggattcatcagataaattttcagccaacaactgtttgagaatgatagtaacatcatgcgtaggaatgctacacttttctaggatctgacattttcagcaatcaagaattactgtattttgtaaaatatactatagtatatagtaaaaaataccatattttgtaaaatatagtaatctggaaatatccctactaaaaacagaacactataaatagaatcatgtcttttgttttcaaagttgatacactagagcaatgcaaaaataataataaaggtgagatatttcacggcaaagttatctctgggtaaatgctgcagccacaagcgccaccagctagtattcttggggccaacggggaaagaatgaaggcacaaacagaaagccactgatgaatctggctagacgcggtgtctcaggcctgtaatcccaacactttgggaggccaaggtgggaggatcacctgaggtcgggagttccagaccagcctggccaacatggtgaaacctcgtctctactaaaaatacaaaagttagctgggcatggtaatacacgcctgtaatcccagaaactactcgggaggcggaggttgcagtaagccaagatcacgccactgcactccagcctgggtgacagagcgagagtccatctcagaaaaaaaaataaaataaaataaaaaaagaaagccattggtgaatctttgttccagtgacaataactccaaagctggtagtttgctttgcaaagaacaaaaggggaaggcaaaaacacgtggagcttttctttctaagaattcggggatgttctatgcacctcctttgtaccttgtgacagctgctatcagtggctgcccacacccataacctaacaacacattaatatgccctagcttaacgctgatacgggagctagaaagaagttatttaggcagagagtgagggcaagagagtcctcggtaaggtttgccttttaataaaaagcagcccccaaatcatttattttattttatttttttttttttgagacagagtcttgctctgtcgctcaggctggagtacagcggcacaatctcggctcactgcaagctccgcctcccggattcaagcaattctcctgcctcagcctcccgagtagctgggattacaggcgcatgccaccatgcccggctaatttttgtatttttagtggagacggggtttcaccatgttggtcaggctggtctcaaactcctgaccttgtgatccacccgcctcggcctcccaaagcgctggaattacaggcgtgagccaccgcgcccggccaaataatttcttttctaaaaaagagcagtctgaaaaatcagccggcagacatagaaaagcaagctggaagcttgctcgggtgaatgccggcagctgtgccaatgggaataggctacctgggtgccaggcgtgttcaacatgcaggcttgctccatgttcccttttctttatcaaccacgtgtacggtaaaggaacaggcaacatggtcctggccaggtagagaccccatctgcataataaaatattagggtgggcagccagcttctttgtactctatgtaaacggcacacctggtccaactaatctttgggcccttatgtaaatcagatatcaccacctaaagctcatctataaaaccccgtgcatttcaccatgaaactggaagacccacttgggagccccctctctttgcaggagagagagcttttctctttctctcgcctattaaatttcttttctttctttctttttttttttttttttgagatggagtcttgctctgtcacccaggctggagttcaatggcacaatctcggctcactgcaacctctgcttcccgggttcaagcgattctcttgcctcagcctcctgagtagctggaattacaggcatgagccaccacacctggctaatttttgtatttttagtagagatggggtttcactatgttgcccaggctggtctcaaactcctgatcttaggtgatccacccgtctcagcctcccaaagtgctgggattacaggcatgagccactgtgctcggcctaaacctctgctctaaaagtaattttttgtgtgtctgcattttattttattttattttattttattttattttattttattttattttattttaagacagagtcccactctgttgcctaggctggagtgcagtggcacgatctcggctcactgcagcctccgcctcctgggttcaagcaattctctgcctcagcctccggagtagctgggattacaggtgcctaacaccataccacactggctgattttttgtatttttagtaaagacggggtttccccatcttggccaggctggtcttgaactcctgacctcgtaatccaccctcctcagtctcccaaagtgctgagattacaggtgtgagccacggtgcccggccatgtctgtattttctatttccttggtgtgaggcaatgaacctcgggtattaccccagatggatgacactgcttcaatatctgccagtcactacactttgttatcagtgggattacatcaactggagcccattctatctgcttggaggccaggcctgaagattcaaggggttgacaccctctaggagcaagcctcaagtcaacccatgactgacagtaggtgggatataaatacctcagctccctcacccctcggttggaataactgaagagtatgttccatgccgctccccagtcatccctggggaggttaagttccactttctcaccatgtaacttatttgaagacacacccagtattggctctttgcctttcctgattcactttctcctcccccagctggtgctttctggggccaccttcttgataaactacttttgctagaatccttgtctgagggtctgcccttgtgagaccctaagatgttaccagagagagttaggaagctgggaatggggtggaagtgttgctgtataatcgtcagacagagttgagatctgaaggaaaataagatggttaaagctcttgactctggaatcagagggtcctgggttcaaatctcaagtctgagagatcttggacaagttataactcctctgcaagtctcagtttccattttgttggtgaatagagggagggaggggaattcctactttacaaggttaacatgataatgaaattacactttgttgccaatgtgcctagcacactgcctggtacatgatggttgtgatggctgtctttatacgggagactgggaagagaccctaaaggctgagatttgcttcactggaggcaggaagcggaagctcctttattgggtgcaatgaaagaaggtgttgagagatgggagatagatgttgatgggaaagaaaaagggagagaccatgggaaggagagagagagagaatgatatacattaggcagattaacttctctttattgtgaagaaagggggaaattaggattttctaggctgtcttttagttgcagcaagtcagcaaaaagggctatgatgaccaggcagcattgagcaactctgactccgccttcccctcttcgcacaccttctggttactgaaaacccagcgttagtagaaaagtttcttttctttgaatgacagaactacagcataatgcgtggcttcaacctgctcctcttctggggtgagtgtgaggctgaatggggggctaggggaggcctggattggaaatagacttcaggagaaatgggagggccatggatggtccagccaagagatcataagtccagactggatgctgcaaacaccttcattcagggaacctttgacaaaattccatagctcagggaagtccatctgttaggatagatttttctctatagtcattcatttgacctgagcaagtcctgtgtgtcaggtgctgttctaggcactagaggatatagcagtgagaaaaaaagactaagttcctgcactcttgaggctgatattctagtgggtaggagcagacaggaaagaaggcacagatgatcatagcccacttagcactgctgtaacttctttaaacatagagtgtatccaattgtcacaacatttctatgacattgggtcattattagtcctattttgcaaatgagaaaactgaggcaaaagagataaaataattttcccaaggccacttagtcaataaggggtagaggcaggatttcaagccagacagtctgacttcagagtctgtaagcttttccactatactatgttgccccaaaaaataagtaaacataggaatttcaggtagtgataagtgctatgaaagaagttgttatagaatgtggtcgggagttatgttgaagggagaagtctggggttgaggaggggcagttcgagctgagtcctgaaggatgagatagacccttcctgtgctcttatttctctttcttcaggtgtcagtttgtctcagccttgtttatcttctgtgtttctggtttttcttctatgtcttgtgtgttttggtcattggatcaaatttaagaatggaggatattggggacatattctaagtagcaagtatgggtttcctctgctgttgaagagtggatctgaataccctattttaccaaggaggaaactgaggcacaaagagattaaataacttcctcaaggccacgcaatcattaattggtgaagccagatttttaaacctaagcactttgacttcagactttgtatgcctaaacagcatgctgaattacctctaaaataattaatgaatgagtagaagaatttttgttagtaataatagatagaatttgggagtttagatctgtgggacttgttgactggcaggctacattagaagaaataggtggcctgtggacatcaaatgtaggcatgcagagttgttattttggggtgttggcaatggtattaaccattaacactccctattctgccctgaagataatcagcaaagagttgtgataatgatagtgatgataatgatcatgatggtggtggttataatagtgatgatgaaaatggtgatgatgatggtgatggtgatgatgatgatgatgataatggtgatgatagtgataatgaagatgatggtgatgatgatggtgtgataatgaccatgaagatggtgatgatggtgatgatgataatggtgatgatagggataatgatgatgatggtggtgatgatggtgtgataatgacgatgaagatggtgatgttggtgattatggtggtgatgatgatgatggtggtgatggtgataatggtgatggtgatgatgataatggtgatgatggtgataataatgatgatgatgatggtgatgatgaagatgatgatggtgatgatgatagtgataatgatggcgataatgatgatggtgcaggagacctaaatgctgcagggctgcattgcctttaaacactaaaaaatgggcagggcgcagtggctcacgcttgtaatcccagcactttaggaggctgaggcaggcagatcatgaggtcaggagatcgagaccatcctggccaacatggagaaaccccgtttctactaaaaatgcaaaaattagctgggcgtggtggtgcgtgcttgtaatcccagctactcgggaggctgaggcaggagaatagcttgaaccagggagttggtggttgcagtgagcctagatcacgctactgcactccagcctggtgacagagtgagactccatctcaaaaaaaaaaaaaaaaaaaaaaaggaaagaaaaacgaattgccctaccctctcatgaaatgttaatactacagatatactgtatacctatatatgtattttctatatatacatatgtatcttatacataaaagagtaagcttaaaaagatctcttcctgagaaccaagtttgggtccttagaggatatatcaccccttttgagaatgcatgctttaatgtatgtttttgaaaatcagctagaacttttttttttagacagggtcacctaggctggagcgcagtggcatgatcttggctcactgcagtctctatctcctgggctcaagcaatccttccacctcagcctcctgagtagctggggctacaagttgtcaccaccacccagctaatttaaaaaattttttttttgtagagacaaagtctcactgtgttgtccaggccggtgtcaaactgctggtctcaagtgatcctcccaccttggcctcccgaagggctgggattataggtgtgcaccacagtgcttagcctggaactatttaatcaaaaagaaaaagaagataaagacagacaaaatgaaaagcaaaagcaaagtacagaaaaccaggaatggtcattgttaagcttatgcaaaatagtgtatgtttgttccttaactaggtttgtcatctagcctcttcaaacctatttctgtggggccaagccaggagtaattttgcaggttgagcccaaaaggtttttttttttttttttttttttggtggttcatggtgtttttcttttctttcttcacaggatgttgtgttatgcacagctgggaagggcacataagacccacacggaaaccaaacacaaagggtaagttggccagagagaatgcagatgcctgaaggggtagagaaagttttctccccggggaaacatcccaggaagctgagcctcatccagatgcttgctgggagctagttagcggcagagcaagggttaacatgcaagtctcctgattctcacttcaggctctttcctttgtgcttagaattgctgtgtgatctcagataagtcacataacctctctgaacttcagtttcccaagctgtgaaatacagataacaatagggatgttgtgaaactttaattcaaagaggtagctttggaaaccacctggtatgtagtatgagctttataaatggtagtgtagtgagagtagggatggaatttactcaaactacaactcaatgtgcaaaaaaaaagtgacttctttatgttttgttaaatactctcatctacataaactcttgctggataaaggaagaaagacattgtcagttcgtagttgttgatatggtttggctatgtcctcacccaaatctcaccttaaattgtaagaatccccacgtgtcaagggcggggccagttggagataattgaatcatgggggatggtttcccccatactgttctcgtggtagtgagtaagtctcacgagatctgatggttttataaatgggagatccccgcacaagctctcttgcctcctgccatgtaagtaagacataattttgctcctcatgattgtgaagcctccccagccatgtgcaacagtgagtcaaattaaacctcgttcccttataaattacctagtctcgggtatgtctttattagcagcatgaaaacagactaatacaactgttcccagtgtctctgtttcctggttcttctttgggcaacttagcaacttggtctatattgtgttaacagctcatctttcacattttttttttttttttgagatagattctcgctctgttgcccaggctggagtgcagtggtgcgatctcggttcactgcaagctccgccttccaggttcacgccattctcctgcctcagcctcccgagtagctgggactacaggcgcccgccaccacgcctggctaatttttttgtatttttagtagagacggggtttcactagaaaccaggctggtcttgaactccttaggtgatctgctcaccccagccttccgaagtgctgggattacaggcatgagccactgcgcctggcccctttgtaggactttttcaaaagggctttattgagatggttgggaaaattttctcaaggaagtgatgttccagtggacttaaaggatggatgaattgatgttacccaggcaaaggggcagggtgggatagggcatgtctggtggccagaacggtgggtgcaaaggtcctgaggttggaaagaatttggaggaccgagcgaaggtgagtgtgactgatgacacagggcaggagatgagatggggaggtggacaggtacctagtcccacaagaccgggttgttactctgaccttggtgggtttcagttgtgagggagagggctagtggaagagaatgatgggaaacttacagcattaagagaccacaagtgataaaatgccggaagtctgcatagagaaatgttgcctctacagatgaaagaggaagctggaaatgagaagagagataccatctgaggcctcatgcagggaagggaaataaacaaggcacattataggagcaaagaacgtagatctcaaaaccaaatgtgtaacaaaaacagggtgaataatgtcacaatcacgataatccattccttctgtttttatgatactttttagtttttccatactcctaattgatgttggcattatcgttggttcctctcttttcactcctcacatccaatccatcggcaaattttgttagtgttgctttaaaaaaatcctgaattgcattcccttcattgattccctctgggttgtatctactgacatctttcacctggacaagtgcagtcaccccctccttggtcagtttatttctgatcttctatagttcgtcttccaaccagtggccagaaggctcatgttaaaaccttatgttgtgtccctactctgctcgaaatcctcccatgactcccatctttctttgataaaaaacccaactccactattcacaatagtcaagatatggaatccacctcagtgtccgtcaacagatgaatggttgaactcaatgtggtctgcatacacaacggattgctattcggccataaaaagaatgacattccacaatttgcagcaacatggatgaaactggaggtcattaagtgaaacaaaccaggcacagaaagacaaatgtcacatgtcctgactcataggtagttgccctactgtgctactgagcactcgatctcattccttccatctaactgtggtttttgtaccaaccagtcaatccctctttatcccccttccccactatcctttccagcctctggtaattgtcattctgctctctacctccattagataatgatgatgatgatttttagctcccacgtaggaacgagaacatgcaatatttgtctttctgtgtctggtttatttcacttaacataatgtcctccagtcctccagttccatccatgtttctgcaaaggatgggatttcattctttctttctttttttattttttatttttttgagacggagttttgctcttgttgcccaggctggagtgcaatggcgcaatcttgggtcaccacaacctccgcctccccagttcaagtgattctcctgcctcagcctcctgagtagttgggattacaggcatgaaccaccatgcctggctaatttttttttatttttagtagagacgggggcttcttcatgttggtcaggctggtctcgaactcccgatctcaggtgatctgcccgccttggcctcccagtgtgctgggattacaggcgtgagccatcacgcctgcccgatttcattatttcttatggctgaatgatattctattgagtacatatacgacatcttcctcacccattcatccactgatagacacttaggttgattccatctcttgcatgtactttggattttgaaaggtctggctctgctgctctccagcagatgtggttgtgtgtctttgggtaagtcactcaacctctctgagtcatgttttattttcacatatgggtattgggaatggtgcccatttcctgtggctgctgtaacaaattgccacaaacttggtcgcttaaaacaaaaaaaacttacctatcattctggaggtcagaagtctgaaatgggtcccactgggctaaaatagaggcaatggcagggctgcgttccttctggatgctgtacggaagaactattttcttactttttcctgtatctagggtcaaccatgtttcttggctcatgtccccttcccccaacttcaaagccagcagtggctggccagctctttcttacatcacatcactctgacaatgcttttcttggtttcagctttcacttataaagactcttgtggttacattcattgcccctggatgatccaagataatatgcccatcttgagatcagcatgattagcaaccttaattccatctgcaaccttaattcctccttcgccatggaccataacatattcacaggttccagggattaggacatggtcctcttggaagggtctgttattctgcctgccacaaggatgacagcagcaagtgagcctctttcctagcacctgggagcctgctcccacctgtggtcttgtccttttgaagctcacagtgtggtggtgaaggtggccatgaaggagcaactcactgaaacaatcaagcagtcacggttttgatgaattccataaaagaagagctcagggagctgtggaggagtcagggaaggcttcctggaggaagtgatgctaaagcaagatctgaaaaatgagtggaagctggccaggcaaagcagaggcagagggaacagcatgtgcaaaggccctgtggtaggaaggctagaaatggagtgcaaagagaaactgacatgatgaggctgaatgatgtggttgggtctggtcactgggggctttgcagttcatgttgagtaatttgagttttatttctaaggagaacaaagagcattataggcaaggggtggaggtgggagatcaaatgtgcattcagagatgaccatggtgtggagtagaagattgtggaggacaatggggtatatagaaatgttaaattcagaggaagatctggatcaggcatagccaaggtggtggggttaaatgggtaattgtcaaattatatttgggaagggggatcaacagggcttggaggcttattaaatgtggtggctaaacaggcaacctgaggtacagacacgtgaaatcacttgtcccaagactggattggctaggatagagtgttgattgtttccatagaaacaaaataactatgaatgaaacaatgcagatgtttatttttatctgtctcataaatctccaacttgaagatggaacagcgtcgtggaacaaccttgcctaggaggtcattccatctcccaggtgccttttgccttgttgcctctccaatcttaggcgtgagcctcatccccgtggttggaaatggatcaccccagtctgtccatcttccagcccatgtgaaaagggagaaaaagtgtggagtatgctctttcttttcaagggcatgaccagacagtacacacatcacttctattcattctccttggccagattttcaccaggtggccacagctagctgcaagagaagctgggaatgcagtcctaaactggatggttctattattataaggaagagggtggaatggatttgggggaacagccaccattcttggctttgaggtttgctgctggaacttgaactcagatctgccttgtcccgaaatttgcagttttcactctcacacttttctgtctagtgcttggatgttcatggtgtgatccatggagcaacagaattggcatcctccaggcacttgttagaaatgcaaaatccccggcccccttccccagacctgctgaattagtacctgattttccaagatgttcttggaatccaaggggaggcaggtgatactggtctgtggatactttgggtagcaaggatccagatgagtgcttctcaaacttccctgtgcgcacacatcacctgggatcttgttcaaatgcagattctgattcaatggattttgcatttccatctaactcccaggagatgcttatgtggctgactcacagaccctactctgagtagaaagggtctaggatctttgaggtacatggttaaatatgattggttgctgtatccgtttcctagggctgcttaaaatgacagaaatttattctcttcaagttctggagtccagaagtgtgaattcaaggtattggcagggccagtctttctccaaaggctatagggcagaatctgttccatgcctttttttaaggcttttgttattgctggcaatccttggtgttccttggcttctagacatatcactctgatcccggtttgcactgttgcatggcactgtccctgtgcatgtctgtgtgtctcttctcttcttataaggacacctgtggcccaccctactccagcactacttcatcttaacttttatcttaattgcatctacaaagacccagtttccaaataagatgaaattcacaggtaccagggtttaggactgtaacgtatcttttgggaggaacacaatccaacccataacagtcacctccacccttgtatgctgggttcccttgcagcctcactctaatgctctaatcttgtctaaacttttctttatacactgcctaggtaataactgtagagacagtaccttgtgcccagcttatgccacctgcaccaatacagtggacagttactattgcgcttgcaaacaaggcttcctgtccagcaatgggcaaaatcacttcaaggatccaggagtgcgatgcaaaggtgagttcatgtcccctcaaaccatccagcatttggtaggaaaatcaagtcaaagctggctgggtattgaatgtaggtactcccccaccccccatttttttttaaatctggtttaactatatattttaagtggagtattaggtcatttctgttcaaggttaatattgatatgtgggggtgttgttactgtcacagcattgctagctagtgttgctagcaaacatgattttcttccttccttccttccttccttgctacttccccacccttcctctctttgatcatgtaaataattcctggtcactgtaaaatttcatggatggttgagtttcctcacaatatggtggctggattccaaggataagcatcccaagagaacaaggtagaactacatgatatttttatgacctagtgtcacttccaccatagtcacaagtatgctcagattcaagatggggacataccttccattgcttgacagaagaagtaccaaagtgaagtgcatatgggatgggagatattgttttaactttttttttttttttttttgcaaaatacagtcttctatctagtataagtaaatttgtaactccaattctctgtctagatattgatgaatgttctcaaagcccccagccctgtggtcctaactcatcctgcaaaaacctgtcagggaggtacaagtgcagctgtttagatggtttctcttctcccactggaaatgactgggtcccaggaaagccgggcaatttctcctgtactggtaatgctctcaggttcccagggatgggtcttgggtggatatctatcagtggggtgagttcatgtatttctgaactgaggcacccaatttcttatctgctcaccctcttccactgcttctcagatatcaatgagtgcctcaccagcagcgtctgccctgagcattctgactgtgtcaactccatgggaagctacagttgcagctgtcaagttggattcatctctagaaactccacctgtgaaggtatccatgaccatctctttattatttacctacttaattaattaagggtcatctcactggaagaccatatgagaaagggattttctcatgtagggataagaaaattggggctcagagaggtaaaaatatatagttgcttatatctttttctatccctttactttgagcctgtgggtgtctttacatgctaggtaggtctcttgtagccagcacatggttgggtctttttaaaaaattttttatctggtttaacaatctatatcttttaagtggagcattaggccatttctattcaaggttaatattgatatttgagggttttgttcctgtcacagcattgctagctagtattgctagcaaacatgatttccttccttccttccttccttccttccttccttccttccttccttcctacttccccacccttcctctctctgatcatgtaaataattcctggtcactgtaaaatttcatggatggttgagtttcctcacaatatggtggctggattccaaggataagcatcccaagagaacaaggtggaagtacatgatatttttatgacctagtgtcacttccaccatagtcacaagtatgctcagattcaagatggggacgtaccttccattgcttgacagaagaagtaccaaagtgaagcgcatatgggatgggagatattgttttaacttttttttttggcaaaatacagtcttctatctagtataagtgaatttgtaactccaattctctgtctagatattgatgaatgttctcaaagcccccagccctgtggtcctaattcatcctgcaaaaacatgtcagggaggtacaagtgcagctgtttagatggtttctcttctcccactggaaatgactggatcccaggaaagccgggcaatttctcctgtactggtgatgccctcaggttcccagggatgggtcttgagtggatatctatcagtggggtgagttcatgtatttctgaactgaggcacccaatttcttatctgctcaccctctttcactgctttgcaaatatcagtgagtccctcaccagcagcgtctgccctgagcattctgactgtgtcaactccatgggaagctacaattgcagctgtcaagttggattcatctctagaaactctatctctttattatttacctgcttaattaattaagggtcatctcactggaagaccatatgagaaagggattttctcatgtagggatgagaaaattggggctcagagaggtaaaaatatatagttgcctatatatttttctatccctttactttgggcctgtgggtgtctttacatgttaggtaggtctcttgtaggcagcacatggtttggtcttttttacaaaaatttttatctggtttaacaatctatatcttttaagtgtagcattaggccatttctgttcaaggttaatattgatatttgagggttttgttcctgtcacagtgttgctcgctacttgctttgtgatctcagttgtgtaattgctttataggatctgtgaactatatgcaaatattaagtggaagagctgggatttgaactcctgctgaggacctactataagtcaaacaatggtatcagaatataatggggtgcacttgtctccagaccgatattttccccaggggacattggcaacatctggagatatttttgattgtctcaaccggtgatggtggggagaggtgctgtgtatggcatctgatgggaagaggtcagagatgctgctaaacatcctataatgcaccgaaaggcccccacaaccaagaataatctgaccctaaatgccaatagtgctgaggtggaaaaaccttattctgggctgggcgcggtggctcacgcctgtaataccagcactttgggaggccaaggcggatggatcacttgaggtcaggagttcaagactagcctggcgaacatggtgaaaccttgtcgctactaaaaatacaaaaaattagccgggcatggtggcaggcacctgtaatcccagctactcgggaggctgaggcaggagaattgcttgaacctgggaggcggaggttggagtgagctgagattgtgccattgcactccagcctgggcaacagagcaagactctgtttcaaaaaaaaaaaatacccaacaacaagaagaacaaaacacacaaaacctattctggggagattctaaagtctaaacttcagaacgttcccctaaaaggtatttgaattaacagttgaaagttatctttaatcagccgggcgcagtggctcctgcgtgtaatctcagcactttgggaggccaaggcaggcagatcatgaggtcaggagatggagaccatcctggctaacaaggtgaaaccccgtctctactaaaaatacaaaaaaaaatagctgggcctggtggcacgtgcctgtaatcccagctacttgagaggctgaggcaggagaatggtgtgaacccaggaggcagagcttgcagtgagccgagatcacaccactgcgctccagcctgggtgacagagcgagactccatctcaaaaaaaaaaaaaaagaaagttatctttaatcttttctctcccttcacattaaagcagtcatcacaccttggagaatctacctgctaaatatgttttgagactgggtgtggtggctcacacctgtaataccagcacttagggaggctgagatgggagaatcgcttaagaccaagagtttgagaccagcctgggcaacatagtgagaccctgtctctacaaaaaaaaaaaaaaaattagaaaattagccaagtgtggtggcatgtgcctgtggtcccagctactcaggaggctgaggtgggaggatcacttgaaaccaggaggttgaggctgcagtgcactatgcttgcatcactgcattccagcctggataacagagcaagaccttgtctcaaaaataaatatataaataaatatgtgttgaattcctccactgttttccatccttggttcaggcttgatcatcactgcagcagcctcctctctagtcttgcctttttcagtcttattctctccaatccatcctctacactgcagccagaatgtcctcaccaagagacaagagctccatcttcctgtgtctagtgcattgttattctccacattcatttatgggatggtgactccattgagaaaggcaaggagtggtcaagccctcattatatccccctggcttagtttaagagatgtttgaaatcatctctgcctttgctactccatttgtagcagtgagctatcactgggtaacaaattgtcttaaaaattagtgtctaaaaacaaccaccatatatttagcgcttgattccatgagttgacattttaagtggtctattctagccagatcttttggtctcaactggtcttgttcttgtgtctgcagtcagctgaccttggctgggcttttgtcttgttgcctctgccaccttaggtgtgagcctcatccccatggttgggaatggatcaccccactctgtccatcttccagcccaggtgaaaagggagaagaagtgtagagtatgctctttcttttcaagggcatgaccagatggtgcacacatcacttctatttattctccttagccagattttcaccatgtagctacacctagctgcaagagaagctgggaatgcagtcctcagctgtattgttacattattacaaggaggagggaatgggtctcacatgtctggggctcatctgggatgattcatttctctcccatttggtcttttgttcttcattaggctagtcaggggcttgttcatatggcagagatcagaggcccaatagaatgaacagaagccaacaggtctcttgaggcccaggtttggaattagcacctcattacttcactgtcttctattggtcagtgcaagtcgtagggccagctgtatttaaggggtagagaaacagactccacctcttaatgcaaggtatggtaaagtcacatctcttacaatctacatcttggggtgtaaatacagagagaagtaaaggactatggctacttttccaatttctgataattatgttttgaaactatttgccacccttctgcttacatgctattggctagaatttgctctcatggccatgcctactgaaagaaggaactgggaaatatgtcccactgtgtgcctgggaagaaggggggaacatggatattggggagcatcagccctgtctgctgaaaatcaacactcagagtgcatctcctatttgtagtctctactccttgctttctcatttaccttgacctgggttttctcttccactcttcagacgtggatgaatgtgcagatccaagagcttgcccagagcatgcaacttgtaataacactgttggaaactactcttgtttctgcaacccaggatttgaatccagcagtggccacttgagtttccagggtctcaaagcatcgtgtgaaggtaggtgggggtgtcttctgagaagtcaggtccaagtctgtttgaaaagacagcagtgaggggattagggtgggtcttggttgagtttgagactttcatctgcaaatctgaagccaataatcattcattcactcattaaagaaatacctcttgagcacttacagtatacgtggcactattctaggcactggggatagagcagtaaataacatctccaaataacatcccactggggcttagggcttccatataggaatttggaggaggggcaccattcagtccatagcacccatgaacaaacagcttgtaagtgacagagccaggctatgaacccagaatgtccatgttctcaacccctccactgtgtgcctctttttgtttgtttgtttgtttgttttttgtttttttggggtttttttgttttttggttttgttttgagatggagtcttgctctgttgcccaggctggagtgcagtggtacaatctcggctcactgcaacctccccctcctgggttcaagcaattctcctgcctcagcctcccaagtagatgggattacaggcatgtggcaccatgtccagctaatttttgtatttttagtagagacaaggtttcaccgtgttggccaggctggtctcaaactcctgaccccaggtaatctgcctgcctcggcttctcaaagcgtttggattacaggcatgagccactgcgcccagcctgttttttgtttttgagacggagtcttggtctgtcgcccaggctggagtgcagtggcttgatctcagcttactgccacctctgcctcccaggttcaagcaattcttttgcctcagcctcttgagtagctgggattacaggtgtgtgccaccatgcccagctaattttttattcgggacaggtaagccccaaagtggggtttagctcacaagggttcttggctttgcccaggagagaattcaagggcaagccagaggtagaagaaaacagctttattgaagaggcagtgttgcagttctgtaagtgttacagctcctgcagagcagggctacttcataggcagagagcagcagctcagggcagttttgcagtcatacttatacctacttttaataatatgcagattaacaggtggtttatgcaaaaatttctagggaaggggtagtaacttttgggtcattgagtcattgccatagaaaggggcagtaactccccaatattgccatggcaatggtaaactgacctggcacactggtgggcatgtcttatggaaagctgcttccactctgtccttgttttagctagtcctcaattttgtccagtgtctgagtccctcatctggagttgagtcctgtttcctgcctcattactagcttagcataatagaaatgtatcactctcataataattcaatatggatatacctggctggtgggcagcttttctccacatggtgataaaggagttcaatctctctccatcttttggtttttgcattccttagagccttggtgttcctggtttagccagttgaggtgaaagagggaggagagaagtcacacccacttcttgaccaccttggccctgaagtgacatatatcatggctctcatattccatgagtgaaaagtagtcacatgacctcacctagatgcagagggttctaggaaatgtagtccctggctgggacaccattttctagtgaaacatgactccatattttgcaaagggaagcatgattttgttggctcattggccaacttggctccacacccattctgtaccccacagatattgatgaatgcactgaaatgtgccccatcaattcaacatgcaccaacactcctgggagctacttttgcacctgccaccctggctttgcaccaagcaatggacagttgaatttcacagaccaaggagtggaatgtagaggtgagcagagagtttgatggacaatccagaaaagacatttctctttgctcttctgggtttcttgatattctccagttctttgcagatattgatgagtgccgccaagatccatcaacctgtggtcctaattctatctgcaccaatgccctgggctcctacagctgtggctgcattgcaggctttcatcccaatccagaaggctcccagaaagatggcaacttcagctgccaaagtaataatctctttgtatgtcttggcaatggaatctgtttctggctttggttggaaaattctcattctacccaacctcgggatcttcctcttagtgttgcctcatccacatattctgtttctttttcttcttcatccatttactctttcaacaaatgatttttggagtacctattaattaattagttaaacaggaccctgcagtaggcactgaagatttggtcctgaatatcataggcatgcttcttgtcctcttgtagcttatagtctagggaaggagccagaacacacacacacccaattatttaattataactatgaatgaaacaacaacaaaaaagtgtgcttttttttttttttttcacccaggctggagtacagtggcaggatcttggctcactgcaagctccacctcccgggttcacgccattcttctgcctcagcctcctgagtagctgggactacaggcgcccgccaccacgcctggctaatatttttgtatttttagtagagacggtgtttcaccatgttagccaggatggtctcgatctactgacctcgtgatcagcccgcctcggcctcccaaagtgctgggattacaggcatgagccactgcgcctggccaaaacatagtgtgctttgaagtggctaataggatattgattatgctccaagcaaacaacatttaagcagaaacctgaaggaggagaaggacttctctagaggaagaatggagatcatgctgttctgggttatagcagatgcaaaggtcctgaggctcacaccaaatgaggacaaggggaagtggcagtagacatatctgatgaagtggacagaggtcagattctgcagggtcttggtggcttgtgaagaattttgaaagggctggatgcagtgacatacctataaacagcactttgggaggccaaggtgagaggatcacctgaggccaggaattcaagaccagcctgggcaacattgcaagactccgtctccacaaaaaataatgataaaaaattagccaggtgtagtagcatgggcttgtagtcctagctactcaggaggctgaggtgggaggatcgcttgagcctgggaggttgaggctgcagtgagctgtgctcatgccactgcactcaagcctgggtgacagagtgagaccctgtcttttgtttttttttctttttttttttttatggagtctcactctgtcgcccagactggagtgcaggggcgcgatctcagctcactgcaacctccacctcccaggttcaaatgattcttctgcctcagcctgccgagtagctaggattacaggtgcccatcaccacacccagctaatttttgtatttttagtagagatggggtttcaccatgttggccaagctgttcttgaactcgtgatcttgtgatcctcccacctcagcctctcaaagtgctgggattacaggtgtgagccaccgtgcccggccaacctttcttttaaaaaagaatttcagagtcctttcccctccccccaagaataatggggaaccatgaaaggtttaaaactgttaaattatgtattatttattacattaaaaatatgtgtaacttattggaggcaatgaagtataacaagcaaatgaatatatctgatgtatttccaaatataataaagataatatcatcaatgtcgctggttctcctatatgtttcttctccattctatctccttgtatcctccttagacagccacttggaattttgtgtttattatttccctacttaaaaaaatattttcccatggtatgtacccctaaacaatatctgcctagtattgcttgtgtttggagctttgtaaaaatgatatcatactacatatgactatagatgtatgtcttttatatgtatgacttctctaatttgctctgtttcactcaatatcatgcctcttagagtgtaagctgtgcagggacataatattgagtgagaagtcacacatataaaagacatacatccacaatcatatgcatgattgcctctaagaggcatgatattgagtgaaaccgagcaaattagaaaattgtgtgttgtagtaaacacgtccttcatgttgtagtgtgtagttgtggtttgttcattttcccccttgtgtattagggtaatagatggattttaagtcgggcacgggaggacatgaaatcagacttgaattttcatcttattttgctgaggttgaagtttggtttggttgctgttgttttcttcctaggggttctcttcaaatgtaaggaagatgtgatacccgataataagcagatccagcaatgccaagagggaaccgcagtgaaacctgcatatgcaagtattttttaaggttcctagtttttgaggttttcttagaagccatttaggtagaatgttgtttttgcagttctaacaaaggcaaaagtaatagtggccaaaaccagacagcagtttatttttctcctctgtaacctgctgagtgtaagctgtgcagagctcataccatggctccattatgctctgccagcatcaacacaagactcccactttgtggcccaaggtggcagctccagctcctgccctcacatctgcattccagcttgtgggaaggggagaagaggaagtgaaaagtacggtccttctctttaagcgtatgacccagcaccacttctgcttgcacctgattgggtagaaattagtcacatggtcccacctagctgcaagggaagctgggaagagagaatgtttgcctatctaaaacttgaggattctcttaataaaagaacgggagaatatattggagtcttcctgccagtgaaggtgttgatgctgcaactgagtaatgttggtgtgggggtgttacacagccagccaggccaaaaggaatttggacatcctgactgtctaatgaagtcattacaatgagtaaagactccatgacctctttagaaatcaatgtcactattctaaatatgagcttgtaaattggctatgggcttcccacatgccttggaccactgtttttcttttttaattgtggtgaggtacacataacataaaattcaccactttaactattttaaagtgtgcaattcagtggcacttagaccattcacaatgttatgcaatcatcacctcaatctagttctagaaatttttttttttttttgagatggagtcttgctctgttgcccaggctggagtgcagtggggtgatcttggctcactgcaacctccgcctcctgggttcaagcaattcttcctgcctcagcctcccaaatagctgggactacaggcacccaccaccatgcctggctaatttttgtgtttttagtagagacggggttttgccatgttggccagactggtctcaaactcctgaccttgagtgatccacctgcctcagcctcccaatgttctgggattacaggtgtgagcaccgtgctcagccaagttctggaatatttttatcactaagcagtcactccccattctcccctcccactagcccatggcaaacactaatcagctttctgtctctgtggatttgtctattcttgacatttcacagaaatggaatcatgcaatgtttgctcctttgtgtctggcttctttcacttagcatgatattttcaaggttctttcatgctgtagtacatatcagagaactccattcctttttatggctgaataatattccacatggaccactgttagttcatacatttcctcttcttttaatatcactggttgggaacaggccccccaaaatctggccataaactggccccaaaactggccataaacaaaatctctgcagcactgtgacatgttcatgatggccataatgcccacactggaaggttgtgggtttaccggaatgagggcaaggaacacctgcccagcccagggcggaaaaatcgcttaaaggcgttcttaaaccacaaacaatagcatgagccatctgtgccttaaggacatgctcctgctgcagataactagccagacccatccctttatttcggcccatcccttcgtttcccataagggatacttttagttaatctaatatctatagaaacaatgcttatcactggcttgctgttaataaatacgtgggtaaacctcgttcaaggctctcagctctgaaggctgtgagacccctgatttcccacttcacacctctatattcctgtgtgtgtgtctataatttctctagtgccgctggcttagggtgtccccgattgagctggtttcagcaatcactaagtagttttgctatttgtttatgtttgctttttttattcatggaaggaaaaggtgatgtgattctaattctgatcaagtaatgagttttagtttccctgagaattctagagactcaggaattcagagccacctcatatgatgggctttatgggctaatttgtagattacatgcttgggggaatacatcgattcatgctcacaaatgctctttttttttttttctgggacgcaggtctccttttgtgcacaaataaataacatcttcagcgttctggacaaagtgtgtgaaaataaaacgaccgtagtttctctgaaggtaacgattgggtcttttaaattgtgttttgagtttcaaacatcttgggcacactttgggtgcagaaagatgtctttatggctgggcgtggtggctcacacccataatcccagcactttgggagattgagtcagatgaatcacttgaggtcaggagttcaagaccagcctagccaacatgatgaaaccctgtctctactacaaatacagaacttagccgggcatggtggcaggtgcccatagtaccagctactcaggaggctgaagcaggacgattgcttgaacccgggaggtggaggttgtggtgagccaagatagcaccactgcacttcagccttggcaacagactgagactccatctcaaaaaaaaaaaaaagaaagaaagaaatatctctttataatgaatggattgtgaattaatatttaattttttatagctgtaagatttgaaaaattagcatacagtaaaattacctttttacttgtatagtttgatgagttttctcacctgaatagacttgttgaactaccactataattaggatgcagaacagtttaattatctccaaacattcccttgggcttctcctttatagtcagatactccctccaccactaaactctataaatccctgatctggtctctgtcaccagagttttgtctttggaagagtgttatataaatgaaaccacatagtatgtggtcttttgagactggcttctttgactcagcatagtgcatttgagatgcctggatagtgtgtatataaacaatgccatttcctcctcctcctccttcttccttctttcttttccttcctttttactgttaatgagattcagcacattctcattgctgtatataaccatcaccattatccatctcaagaactttctcatctttctcatcttttcagggggacagaattggttggtggttttttttgtttgtttgttttgttttgtttgtttgtttgttttgagatgaagtcttgctctgttgcccaggctagagtgcaatggtgcgatcttggctcaccgcaacctccacctcccaggttcaagcgattctcctgcctcagcctcccgagtagttgggattacaggcatgcgccaccatgcccggctaattttgtatttttagtagagacgaggtttctccatgttgatcaggctggtctcaaactcccgacctcaggcgatccacctgcctcggcctcccaaagtgctgggattagaggtgtgagccaccaagtctagccaaaagctagtttttcttaagctttaagttgaactcattgatattgtcattttctttataaatctggttatttttgtatgaaaataagaataacacttttacttataattgtattaattttaaattaatacatttatttttattcataaagtatacattcatccctagggttttcagattaaattttgataaatgattaatcctatttacaaacttagttcaatttcctcgaatgttttatactatgtttataaatattccaattcccccctcccgctccacccaaatttcaagtacctggtgaagaggatttacaaatctaataggcaaagtcacttgggtcctgagcgactcataaatccaatcgatcgaatctataaatataataattcagattcttttagacattcaatatggtttataaatagccacgttctcttaaattgttcatattaaaataacaagtctaattgctttttgcaataaaattatgtggtttattggttagcttctctaatgtgtcaaactgttccaactctttttttttttttttttttgagatggagtcttgctctgttgcccaggctgcagtgcaatggcgcaatattgactcactgcaagctccgcctcccgggttcatgccattctcctgcctcagcctcccaagtagctgggactacaggcgcccaccaccaagcgtgggtaatattttgtatttttaatagagacggggtttcaccatgttggccaggctggtctcgaactcctgacctcaggtgatccacccacctcagcctcccaaagtgctgggattacaggcataagccaccacacccagccccaactctttaaataggagatgtttctagattatgctaaagatgtcaaaaacttctaaatttaacacaaatcctactaaggatgtttagtttgcctaaaattttctaactttcctgaggatataaaataacttccctagctaagaataaatttaacatatcagaggggcgggatttgaagagattttgccagttgtcgaactgagtactatgtttcctggagatggtcctagttgagatgtttctgctatgtcagtggggaggggagtcccacacccatgccttttggggattacagagctcagggcttcctgtttctcttggacaaatatctctcaaatgtcccgcttaccccgtgtttattgaaatcctttttttccttttatcatctaatttggatagatagaaacttgtattgctgctcaaatttcagtttaatttcctctaccatctgactggatttaattcatttaatgcattttcctgcatttattaggttctggattccttttagttttttttttttttttttttgcttgggtcagagtcacatgtgatagtcaatttattgataataatcaataataaggggaatcatatgaatattactattactattgttgttattgtttttcttaccttaatcctattcctcaaacacatccagtgttaagaggtagataagtatcttcccctatctttttaccttgtaagcatgtacacacatacacacatatacatacatacacatacaaataaacacacacacatatacacacatgcgcacacacatacacatacatacaaatacatacacgtatacacacgtgtacacacacatatacacctcccccacatgcacacacatgcacacacagtatgtacacacatacacacatatacatatgcatatacacatataacatacatacacatgcacacatacacatacaaatgcatacacacacaccccacacacatttacacacatacacacaccccacacacatttacacacatacaccccacacacatttacacacatacacacatgtatacacacatctatgcatgtacccatacacacatacagacatacacagacatctacacacagatacacacatacacatccacacacatatacacactcctgacacacatacacacatatatacatacaggcatatacaaatgtacacacatacacaaacacacatatatacacacacgtatacatacatatacacaaacacacatacatacataggcatacatagacatacacagagatatacacacatgcacacgcatgtacacaacccaacacatacacacatatacacacacccacatatataagcacacacacacacatgcacacacagtgcagtcattttattgagcacttactatgagaggtttaggacagtgattaatgattcagcctctgctgccagactgccaaggttcaaatcgtggttcttccacctgctagatatgagtccttgtttctcctttcaaaaatcaaaataatcataaatagcctctacttcatagatatcttctacaaattaaacaagttaatatataaaagacatttagagcaatacctggctcgtaataagtgtgtgctatttttatttctatatgccagaacataaataccataatataaaattttaaattaaaccaattgtttctaaaccaaatgcaatactatatacatgatactctgtaatttgctttagtgaacagtggctcagagacccttttgcttgttaatgcctataggtatactgcaatattcattttaacagctgtatggctgttatttgatttcatcttcatttattgacccagtctgtagggcatttaggctttccacaaactatcctgagatgaacatcactggacaagatccttgcacaacttttaagtatttctgaaaagattaattccaggaaggggaattgctgtgtcaaagggtatatgcaatttacatggctatgggtacaaacttactgcattgcataaaggttacatcaatttgtctttcttgcttgctttcttgctttcttttgacaagatctcactctgtcacccaagctggagtgcagtggagtgatcatagctcactgcagccttgaactccagggctcaagagatcctcccacttcagcctcctgagtcgctgggactagcgtcatgcaccaccgtgcctgctcttttttaatttgtttgtacagatggggtcttgttatgttgtccaggctggtcttgaattcctgaacttcaatttgtatttctttttttttcttttttcagacagcctctctcactgtcgcccaggctggagtgcagtggtgcgatctcagctcactgcaagctctgcctcctgggttcaagtgattctcctgcctcagcctcccaagtagctaggattactggcacgtgccaccatgcccggctaaatttttttgtatttttagtagagacagggtttcactatgtttgccaggctggtctcaaactgctgacctcatgatccacccacctcagcctcccaaagtgctgggcttacaagtgtgagccactgcacccggcctgaatttgtatttctgatggggcttcttgaatcagaaaaaggagcccgagtggatgccccttttaattctcctttggatggactcccagcctattcttaatcagaaaagggacagctgttatttcattaatgagagagagagagagaatgaacaaacacatctttccttgcagaatacaactgagagctttgtccctgtgcttaaacaaatatccacgtggactaaattcaccaaggaagagacgtcctccctggccacagtcttcctggagagtgtggaaagcatgacactggcatctttttggaaaccctcagcaaatatcactccggctgttcggacggaatacttaggtaggagacaccctttgtggcaaggttacacctaggggatgattttgaaagttgactttggcaatgggatattccctgggtttcccacccattctttccccaactgtttaaaaactttgaattcacagcaaagcaagtctaatcatattaacaacattttccattcactgagtgcttggcaaaggccaggcactgtgctaagaccatatcattaatttattctacaaatatttgctgattagctgctatgtgctgggctaaggtatgacagtcataggctgtgctcaagtacttcctgtttgccctgctgggcccatggtagaattgtacttcctggctactgtgtggttaggtgggatttggggagtagctcaggccaataaatatgggaatagagtagttgcaggtatgagactttccagaactttccctctgcccatatgaataacagtgcttcagatcacagctgctccttctgcctgggtcccagaataaagacaatatagaacatggcctcaagtcaatttacaatagacccaaagcattaatgagatgtaaacacttgttattttttaatccactaagacttagggttgtttgttactgctgcaagactgatcctttcctgactgatacatacttgatagataactacttgggaatagtggttgctgtagatcttttacattagcaccccactcctggtagtagttccagtatcattcacataaacctacgaagttcctacctaatggatgcccagacggccaagaggtggaaataaagtatttggtggactccaaccagtagtgaacaaaattagcctcatgaatctcatattttagtgagttgagtcagataataaacaaacagacatctggtataccaaatagaggtagcactattgagaaaaagtacagcaggctagggaggttagagagggttgggattacagggagagttgctattttatatagcaagatcagagtaagtctcattggggcagggatgtcagggaagagagccacgtaaatatctgcagaaagagcaagtgcaggaatacctggagaattcaaggaacaatgaggtgcacagtgtggctgaagtggcattgaagatggtgagagcagtaggagaaaggaagggagatggaaatgtagataaatgtagggagttaaggttttttttttcttgagacaggttctcactctgtcacctaggctggagtgcagtggtgtgatcatagctcactacagctttgcactcccaggctcaagtgatcctcctgcctcagcctcctgagtagctgggaactataggtgtgcaccaccatgcttgtctagtttttaaaatttttggtagaaatgaggtcttgctatgttgcccacgctggtcttgaacttctgagctcaagtgatcctcctgctcggcctcccaaagtactaggattacaggcctgaaccactgtactcagccaagattttatttgaagatgaaaggacattggaaaatttgggaacaggtatggtattatctggcttatattttacaaggatacttcttgttccattatctagtttattttcatgaagggccagtgggttaggtcctgcaatgcttgtcatgatagagatgagaaattggaggcacagagaggttaagtcaatgcgcaaatttaggcagctagtgcgtggcagagctggacctcccagttaccaccatctgactacagaacctgagctcttgtgtaccatgctaggcttgccccaatcccttactatttcttttggttttagaaaacttatataaggccgggggcagtggctcacacctgtaatcctagcactttgggaggccgaggcaggtggatcacaaggtcaggagatcgagaccatcctggctaacacagtgaaaccccatctctactaaaaatacaaaaaattagctgggtgtggtggtaggcacctgcaatcccagctacttggaaggctgaggcaggagaatggcgtgaacccgggaggcagagcttgcagtgagccgagatcgtgccactgcacaccagcctaagtgacagagtgagactccgtctcaaaaaaaaaaaaaaaaaaaaaaaaaacttagagagaaaatcatgactgttgccttccatcactgttgactttgaccccatctttccctgatgcaccccctaggagatgagagttcacttctaaggctccagctgggttactcatttatttggtgctatggtccccctatcattcatcatgggcctcaagatctttcctatgatgaattgaactttctattcttttcctttgctcgccatgatggaggtgtacctttttttggacagaaaccaaattcaggactgactttctgggtgacctcatacgaactctccctttctctttttagacattgagagcaaagttatcaacaaagaatgcagtgaagagaatgtgacgttggacttggtagccaagggggataagatgaagatcgggtgttccacaattgaggaatctgaatccacaggtacaggtcctctcctgagaatgcaggttatggtgtattccatcaataagtatttatcgatccctttctaggtgccaagaccagtgccagatagttgagaaccaatgagggtagaaatggtccatgctctcagagagttttccatgtgctagggaagtcaaacattaaataaccttataatactggagtactgagaccttcactggcctatatgatatgtgctggtcacattctgctgttgagcagttgaaatttgtataagccaggttgagaggtactgtaaacctaaaataaacactgtatttcgaagctttgttgcacaaaaagaaggattaaaacgtctcactcatcttttttatatttaaaataatttaaaaataaaaaatatttaaatttttaaaatatgtaatatttaaatttttaaaatatgcaatatttaaaatatatctttaaattttaaaatatcacatttatatgttgaaatgataatatttggcttatactgagttaatatattattaaaattaattttatctttttttacttttaaaaaatgtgtactagaaaatttaaaattacatatgtggttcatactgtatttctgttggacagtgctaatctgtgtcagggatggcaaactttttctgtagagggctcgttagtaactattttaagcattgcaattaatacagcctctatcacaatgatttaactaccattctagtgcaaaagcatccatagacaatatgaatatgaatgtgcctgggcatgtttcaataaaactttatttaaaaaagtaggtgacaaccagattggcccataggccacagttttccagcccctgatctgatctatgcatacgattaatgctatgattaatactttaatgtaaaagcacagtgtgcaatatggaagagctatttaagcgaagtcctgaggaataggtagagaaagcaggagagagtgtgttacaggaagtataagctatggctctgtgttgaaaaaaagcttggtatggtcatggaactaaaagtagagtgggctggagcatcaggaatgtgggggagagagggaaaagaattgagggtcgctgggcgtggtggctcacacctgtaatcccaacactttgggaggtggaggtgggtggatcacctgaggttgggagttcgagaccagcctgaccaatatggtgaaatctcatctctactaaaaatataaagaatgagcctggtgtggtggcgggtgcctgtaatcccagctactcaggaggctgaggtaggagaattgcttgaacctgggaggtggaggctgcagtgagctgagatcgcgccactgcactccagcctgggtgacagaatgagactccatctcaaaaaaaaaaaaaaaaagaattgagggtgttgcatcccagtttattacatttggactttctctgttgggcacagaaagccttggaaagttctgtatacagcaggatgatctgattatgtcttccagatagatgtctttttagaaataaatcctctggctgtgatatgggcaatccattggagaggtgaggctaggggaaggcaaggacatttgtgaggaagccagtggtctgggagagagatgtgaggcttggtctaaggctaattagaagggagaagtggggagaagacaggttcaaggcacattaaggaggaggaatctgttttgcggggagaagaattcaaggatgactctccaggttccagatcaggtaatatcagttattgaagtaggagatgcagataaaagaagatgagagagccaggcatggtggctcacgcctgtaatcccagcactttgggaggccaaggcgggcagatcacctgaggtccagagttcaagaccagcctggccaacatggtgaaaccccgtctccactaaaaatacaaaaaattagctgggtgtggtctcgggtgcctgtaatcccagctactcgggaggctgaggcaggagaatcgcttgaacccggaaggcagacgttgcagtgagccgagaacctgccattgcactccagcatgggcaacagagcaagactctgtctcaaaaaaaaaagaagatgggagaggaattgctcaatttatgatgtctggggggacatccaaggggcagatgaagcctgggggttggtactgtctggttgggacaggaagcggcataggacgtatccctggagaccgtccatatttaaaggggacactccccaaagagactgaaacagaataaccatagatgtgggagaacttatttcccactgagttgcattgtcccttaaaaacacaagttcaaatttatttttaaatgtagccaagacttctccaggtaagagcactgggaggtctgttttgttttgttttctttttttgtcacccaggctggagtgcagtggcgggatcttggctcattgcaacctccgcctcccaggttcaagcgattgtcgtacctcggcctcccgagtagctgggactacaggcacctgccaccacgcctggctagtttttttattgttagtatagacaggatttcaccatattggccaggttggcctggaactcctgacctcaagtgatccacttgccttggcctcccaaagtgctgggattacaggcgtgagccactctgcccagctgtggaagtttttattttgttttgttttgaaatggagtcttgctctgtcactaggctggagtgcagtggtgcgatctcggctcactgcaatctccgcctcccgggttcaagcgattcccctgcctcagactcccaagtagctggagctacaggtgcgcatcaccacgcccggctaattttttgtattttagtagaaacggggtttcaccatgttggtcaggatggtctcgatctcctgacctcgtgatccacccgccttggtctcccaaagtgctggattataggcgtgagccaccatgcccggccagaggttttttttttttaatggttctagaagcccgctggttattttaatctcagagcagcacggtgaggtgcatgactctctctctctctctctctctccccctccctccctctgtgtgtgtgtgtgtgtgtgtgtgtgtgtgtgtgtgtgttgggtcttctataataacaattgagcaaacgattccttcctttttttcatttggggaaacctgcagagaccactggtgtggcttttgtctcctttgtgggcatggaatcggttttaaatgagcgcttcttcaaagaccaccaggctcccttgaccacctctgagatcaagctgaagatgaattctcgagtcgttgggggcataatgactggagagaagaaagacggcttctcagatccaatcatctacactctggagaacattcaggtttgtgaagaggtctctactgagattcttgtctacctgttgggaactcctcgtctctcgattgccttaactctcattttttacgggaagctattgaggccggtaagcttccacaatttccagcaattcaagccaattaacagaagctaccgctagaggaatgaggtctcccactgtcaccaaacagaactaggtccatttgcccatgtgcaacagaaagccaaacaccgaagcaccgggtttttgtagagagagaagtttattgcaaggctgccaagcaaggagacaagagtctggctcaaatctgtcttcccaagctgggaggctggggcaggttttatagtcggtgggtaatgaactgcaatctgattgcatcttacaatgaagtgatgcagggaggtgtgatctgattggatccggccatggggtgttgccaggtcttgatctgattggatcctggatcctgctatgtggtggttgcttctttttttttttttagtctcactctgtcacccaggctggagtgcagtggcacaatttcaagtcattgcaagctccacctcccaggttcacgccagtctcctgcctcagcctcccgagtagctgggattacaggcgcccgccaccatgaccggctaattttttgtatttttagtgcagacggggtttcaccatgttagccaggatggtcttgatctcctgacctcgtgatccgcccgctttggcctcccaaagtgctgggattacaggcatgaaccaccatgcccgcttttttttttttttttttttttttgagatggagtttcactcttgttgcccaggctggagttcaatggtgcaaccttggctcactgcaaccctcacctcctcgggtaaagccattctcccgagtagctgggattacgggtgcccaccacatgcccagctaacttttttgtatttagtagagacggagtttcaccgtgttgctcaggttggtctggaactcctgagcttaggtgatccacccgcctcagcctcctgaagtgctgggattacaggcatgagccaccgtgcccacccttctaggatacattcttaaagcatgttgttcttaaactgttactaaaaatatttctctgcttacttggtttttatgattttttctcccactgcactatgatctctttttgggggaagaactgttttctcatgtctcctgtaaacagcacagatcaaggcatgtaataggtgttcaataaaaacacgttgaatgaggctgggtgtggtggctcttgcctgtaatcccagcactttgggaggtctatgcaggaggatcacttgaggtcaggagttcgagaccagcctggccaatatggagaaaccccatctttactaaaaatacaaaaattagctggatatggtgacacacacctgtaatcccagaactttgggaggcccgaggcaggtgaatcacttgacatcaggagttcaatactggtctggccaacatggtaaaaccccgtctctactaaaagtacaaaaattagctaggcatggtggcgggcacctgtaatcccagctacttgggaggctgaggcagaagaatcgcttgaaccccggaggcagaggttgcagcgagccgagactgcaccactgcactccagcctgggcaacagagtgagactctgtcacacacacacacacaaaccacacattcaatgaataagtgaataatgagtgactatgcagaaggctttattatggatttgatgaaaggaggagttttcttctagcaacagcaatgtgagctgccctatcagattggccctcactgcataatgaaataccagcatttttccccattccctcagaacataccctgtgtattcttgttcccagtgactcttgaggatggtcacatttaatccatttgatggggattcccagaagacctttgtttttttgtttttttgttttttttagccaaagcagaagtttgagaggcccatctgtgtttcctggagcactgatgtgaagggtggaagatggacatcctttggctgtgtgatcctggaagcttctgagacatataccatctgcagctgtaatcagatggcaaatcttgccgttatcatggcgtctggggagctcacggtcagtactgatgatttgttccctgaggcagagtatctgcctccaaatccaatgggaaaatattgattaaacatctgttgtgtgtctcccatggggttgggtgttgtgggatggagtcacggggacagaaggggtaggtgatatgcctttgcccctgcagaatttacagtctggttgggaggccatgaaactcaaatatacaatgagaaataatgaccctaagtagggccaggcactggagcaatcacagatcttacttaatgagcacatacagtgtgctgggctctttaagttaagtggttttagacccatttcacagaatgggtaaagtggcccgtctagtcctgaagctagaaattggagcaggtggaattcaaatctggggaagtctctttccactaacacatgcaaatgggtcaagaagaaatgctgtaagaattcagaggtgttggccgggtgtggtggctcatgcctgtcatccgagcactttgggaggctgaggcgggcggatcatgaggtcaagagatcgagaccatcctggccaacatggtgaaacccccgtctctactaagaatataaaaattagctgggcatggtggtgcatgcctgttgtcccagctacttgggaggctgaggcaggagaatcgcttgaacctgggaggcagaggttgcactgagctgagatggcaccactgcattccagcctggcaacagagtgagactctgtctcacacacacacacacacacacacacacacacacacacacacacacaaacaaaaagaattctgaggtgtttccaagagagccgatgatagatcatgaggaaacaatatgaaataagccttggtaaatgagtagatttggaagagaggaaggacatcctcattagtgttgtagaaagtatcctttcacctggctcggtggctcacgcctgtaatgccagcacttcgggaggccgaggtgggcagatcacaaggtcaggagatcgagaccatcctggctaacacggtgaaaccccatctctactaaaaatacaaaaaattagccgggcgtggtggcgggcacctgcagtccaagctactcgggaggctgaggcgggagaatggcgtgaacccgggaggcagggcttgcagtgagctgagatcatgccactgtactccagcctgggtgacagaaccagactccgtctcaaaaagaaagaaagtatcctttcctatcatggtagatccaaggtttaattccctaccagagaggccataagtaagtgccatttcgaggaccctgtggcttaggatttaagagaactggatccagaacaaaactgacttagtttcaagtcttgtctctaccactttctagctgtgttttcttggaaaagtcacttaacttctctgcactgagcccagctctctcatctcaaaaatgagaacaacaataacaaaaaaatactgataactagtatttatatagtatgcttctggcacagttgtacttgaaatgttttcatttaatcctaaaacaactctataaggcaattgccattaatattctcttttcaacagatgaggaaactgagggcacagagcagttaagtgtcttgtccaaaatcacacaactagaaattggccagtttttttctttctttttctttttcttttttctagactgagtttcactcttgttgcccaggctggagtgcagaggtgtgatctcagctcactgcaacctctgcctcccaggttcaaccaattctcctgcctcagcctcccatgtagctgggattacaggtgcccgccaccatgcctggctaatattttttgtttgtttgtttagtagagataggatttcgccatgttggccaggctggtttcaagcttctgagctcaggtgatccacccgccccagcctcccataagtgctgggattacaggcatgagccactgcgcccagccaatggtcagttttcttaaccactttgtgacaatatcatagagaggtgctcataagatggtgcctggcttatctttaacccacagaaaccactcagagacatttaaaattaattttaaaattaattatgaataaatggcatagaagaaggacttagcttgtcacgttccactcctgaagttgaagcattcctgaatgtctgcattatcagttgggattcagtacaggaagcaaaaaccaccccaggtatttcaagcagaaaggcatttaacacagggaattgggtgctcacaaaaatctctgggaggggatggaggagttgaagtcagggggctgtcacttcaattttggcttcaaggtcatcccccaatgcagctgtaactcagaggtcagaaattgctgctgtcattttgccaccccactccaccatgaaattggggactggacagttgaaatgtggaattaggctcactcctgtctgccgaaagctgatatttgcctcccttctgcattccaaaaccttcacagatgtatctcactggagaacttaaattacatccaggaccttagttccaaaggattctgggagatgtagtttgtggacatcaagccccagtaatacatggagtaacgcataggacaggactgggaataggtgctggtggatgccagtggattgcaaaggataatgaaggacagtatctagttcactctgagtgttagagggagaaaattcccccaagctaattttgcccgagccagggttttagataactcttcttcccgcctggggggattttgatcccattctcaggccaactctgaaattccttcctgacagatggacttttccttgtacatcattagccatgtaggcattatcatctccttggtgtgcctcgtcttggccatcgccacctttctgctgtgtcgctccatccgaaatcacaacacctacctccacctgcacctctgcgtgtgtctcctcttggcgaagactctcttcctcgccggtatacacaagactgacaacaaggtctacatcgctcgggctgtgtccccaccaagccccatcttctccccacctgcctcagctcattcctagccaactccctctatccctgttcctacctcagggcctttgcatatgctgtgccctctgcctgtaacactcacttcccagcttcttacctgcttgactccttgtgacagctctcagtttaaacttatgtccctgatcgtgttatgaattatagtggttcctcctattacttgtttttgtttgtttgtttgtttgtttttgatactgagtttcgctcttgttgcccaggctggagtgcaatggcacgatcttggctcactgcaacccctgcctcttggttcaagcaattctcctgcctcagcctcctgagaagctgggaatacaggcatgagacactatgcccggctaatttttttgtatttttagtagagacggggtttcaccattttggccaggctagtcctgaactcctgacctcaggtgatccacccgccttggtctcccaaagtgctgggattataggcttcagccatcacgcacggcccctcctgttactttctaaaccagaggttctctccctgggtgctttttgtccccaggggagacttggcaatgtctggggacatttttccttgtcacaactggagcagcgtgctactgctctctggtgggtaaaggttagggatactgctaagtatcttgtcgtgcccaaggcagccctccacggcagagaatgactctgcaataatgttacagatgtcgataatgctacagtttagaatctctacttccctttatttttcttttctttttttaaatttttaatttttttagtttttttgagacagggtcttgctatgtcacccaggctagagtgcagtggccgaatcacagctccttatagcctaccaggctcaagcgatcctcccacgtttgcctcccaagtacctgggaccacaggcctgtgccaccatgtctggctaatttttgtatttttgtatagagaggggggtttcatcatgttgcccagtctggtctcaaactcctgggcttgagcgatctgcctgcctcagccttccaaagtgctgggattacaagcatgagccaccacacccagccagtaaaactttatttacaaggcaggcagccagcctatggggtctagtttgctgaacccgcctgttttcaaccattccctaaagtagggtgatcgacaatcagttttcctaaaactcttcctgttttagaactgaaagtcatgcgtcttgggaaatcttaggtccagacaaaccaggaccatgggtctccttaccaagaagtgctcctccctgtggtcaagaaccactgcacctctctataaatgtttgtgagatgaatgagtgagctaggtttggggaatttccagccgaggagtctctctcttcctttcttcctttcgatttctctctggggtggaggattctgatgcgcatgcttctcccctccagatgggctgcgccatcatcgcgggcttcctgcactaccttttccttgcctgcttcttctggatgctggtggaggctgtgatactgttcttgatggtcagaaacctgaaggtggtgaattacttcagctctcgcaacatcaagatgctgcacatctgtgcctttggttatgggctgccgatgctggtggtggtgatctctgccagtgtgcagccacagggctatggaatgcataatcggtgagtgacatcctctctcttcctgaagaccctgctgccagggcttatggtgataatgacatgagcaacaagaagagtaacaacagtagcagtagttgtggctaccatttatcgagctcttctattatgtactattggtttcaggaccaccatgtacagcagcatgggttgtgcactgcacaaatccaggatcactactatttgaggtttatgttccaggaagagaacatctggtttacctaacttgattattttccttttcttgcgtgtatgacatggggggtggtgggggtgaaagtgggaaaggaatacttctgcatggtggtgtgcacctgtaatcccagctactcgggaggccgaagcagaagaatcacctgaacccgggaggcggaggctgcagtgagatgagatggcatcattgcactccagcctgggggacaagagcgagacttcatctcagaaaaaagtggggggaatattggggtgctgttattgaacatgacggaatggttgttgtgttgtaaaagcagctaatgtacactagagacataataaaaggagccaatcctttcttcctccctcccactctccctccctccctcctcccttcttcctccctcccctcttccctccctccttccttcctccctccctccctcccttccttccttgccttccttcccttccctccctccctctcttcctcccttcctccctcccttctttccttctttccttcctttcttcgaataaacaattttatgaaatatcttgtctatgctaggctgtgctctgagtgctgagtattcagagatgaacaaacacctaaggcccaaattctcatgaaactcatagtctagtagtggaagacagtttgcagttacacaagcaattaaacaaggtaacttacgatagtgatagctgctgttttaaaaatgcagtgagctctgctagatggataccaggagcagagacaggttgccctatctaaggatagtcaggagtggcttctcagaggaggtgacatttgagctgagatttatttatttatttatttatttgttatttatttatcttgagacagagttttgctcttgtcacccaggctggagtgcggtggcgtgatctcagctcactgcaacctccacctcctgggttcaagcgattctcctatctcagcctcccaagtagctgggattacaggcgtgagaccccacgcccggcctgagctgagatttgaatgataaggtgtaccagtggagagttctgcatagagggaaacaggattacaaagttgtgaattgggaaatgagctcaaccttgggcactaggtaaacatttcaggtacatttgcccaggaagaaggtctaaaagaggaagcgcagtgatctaaaggaaactgaactgcaaccgggaccatcctgagcatcatctgagtctcacctcccagtgttctcctccactagggcatttgttgggacagggttaactgtaaggtcaggactctgagacaagcgctgactcctcctatttctctccacagctgctggctgaatacagagacagggttcatctggagtttcttggggccagtttgcacagttatagtggtaagcaaatactacaacagcctggcgaagtgtgttctgaaggaggagcaaggagacctgcgagatctggaatttccagggacgtgtgcagctgagagggtcacttattcccatcaaaagttctcctttccaggccgggcgtggtggctcacgcctgtaatcccagcactttgggaggctgaggcgggtggatcacctgaggtcaggagttcgagaacagtctggccaacttggcgaaaccccatctctgctaaaaatacaaaaaattagctgggtgtggtggcgagcacttgtaatcccagctacttaggaggctgaggcaggagaatcgcttgaatccaggagacatggaggttgcagtgagccaaattcatgccactgtactccagcctgggcaacagagtgaaactccgtctcaaaaaaaaaaaaataaataaataagttatcggccaggttgcggtggctcatgcctgttatcccagcactttgagaggcccaggatcacttgaggtcaggagttcaagaccagcctgaccaacatggagaaaccccatctctactaaaaatacaaaattagctgggtgtgttggcacatgcctgtaatcccagctactcaggaggctgaggcaggagaggagaattgcttgaaccagggaggcagaggttgcggtgagccgagattgcgccattgcactccagcctaggcaacaagagcaaaactccatctcaaaaaaaaaaaaaaaaagttctcccttccaatccttcattcttgagatttcgaagttacagagtaatttctttgacttgggaattttgtttttccttctgaaaggcaaatacccctgggagggaccataattgtatccgtcttgtgcacaggtccatgagtctctctgaagcagtgtcattgtctgggggtaataatgcctgaggttcgttgcctcatgctaaggaaatcaaggacacagacacacacaaggagtgagtttaagagcagaggtttaataggcaaaagaaagagaaaggagactagctctctgtgtcttgcaagagagagggcctcctgagtgggacttctggcccgcagcaaagtgcaacagattttagactggcttgagggggcggtgtctgatttacatagggcccaaagattggttggacccagtgtgacatttacgtagagcgcgaggaagctggccacccaccctgatcttttattatgcaaatggggtctttacttggctggcaccatgttgtcttctccttactgtctacatggtttacaaagaaaagggaagacggagctgccattttttttttctttttttttagacggagtctcactctgtcacccacgctggagtgcagtggtgcaatctcggctcactgcaacctctgcctcctgggttcaagcaattattctgcctcagcctcccgaatagctgggattacaggcacgcaccaccacacccggcaattttgtatttttaatagagatgggttttcaccacgttggccaagctggtctcaaactcctgacctcacgtagtttgcctgcctcggcctccccaagtgctgggattacaggcatatgccactatgaccagctaatttttgtacttttagtagagatggggtttcaccacgttgaccaggctcctaacctcagttaatccacctgcctcagcctcccaaagtgctgggatttcaagcgtgagtctctgcgcccagccagagctgccattttgaacatgcctattccccaggtaaccgctttcctattggcacaactgccagcattcacccatgcaagcttctagcttgcctttctatgtctatagctcgattctaccggctgctctccattagaaaagaaaatgatttgggagctgcttttcattaaaaggaaaaccttaccgaggacttccttaccctcactatctgcctaaataaatcttttttaaatcctatgtcatctcctaggcacagatgttgaatgaaagaaaaagtaaaaagaaattaggaggaattgtgggggaaggagtgagatgacagagggaaatggtggatcgaggcaaagggaggccagggaatgttaaacacccatctctttgcctcccaacctccatccagacttgacagccctgccagatgatgattcttctgactctcactcatggtggctcattcccttatgtcttttgtcatatttttcgaggattaaatttttttttatttttaatttttgtgggcacaaagtaagtgtatatatttatggggtatatgaaatattttcatacaggcacagaatacataataatcacatcagagtcaacgaggtatctgtcccctcaagcatttgtcctttgtgttacacacaatccaattatgttcttctggtttttgttttgttttattgtttggtttatttttatttttattttgagacagagtcttgctctgtcacccaggctgcagtgcaatggcatgatctcagctcattgcagtctctgcctcctgggttcaagcgattctcctgcctcagcctcccgagtagctgggattacaggtgtgcgccaccacgcccagctaattttttgtatttttagtagagacgggatttcgccatgttttccaggctggtctcgaattcatgacctcaggtgacccacccgcctcgacctcccaaagtgctgggattacaggcatgagccactgtgtccagcctctcctggttatttttaaatctacaatgcaattattattaactatagtcaccctgttttgctaacaaatactagatcttattcattctttctatttttttgtacccattaaccatcccctcttccctgttccccacccaccccttcactatccttcccagcttctggtaactgctgttctactctctagctccatgagttcacctgttttaaatgtttagctcccacaaagaactgagaacatgtgaaatgtgtctttctgtgcctagtttcatttgtaatgtttacttgactgatctaagtcttgggaatgcttgaaattatattcctccacagaggttttgtgctgatgtctatcagattttttttaatggggggcatgtattaattttcaggggtcaccgtaataagctactgcatgctgggtggcttagaacaacagagacttgttgtttcacagttctggaggcttgaagcctgaaatcaaggtattggcagggccacgctccccatgacaacacgagggagggtctgttccagacccctctccaacaaattttcccatttgtaagatcaccggccaggtgcagtggctcatgcctgtaatcccagcattttgggaggccgaggcgggtggatcacctgaagtcaggagttcgagaccagcctggccaacatggcaaaaccctgtctctactgaaaaatacaaaaaatgagccaggcgtggtggcaggcaccaatagtcccagcctcgggaggctgaggcacaagaataacttgacccctggagggagaggttgcagtgagccgagataacatcactgcactccagcctgggtgacagagggagactgtctcaaaaaaaagaaaaaaaaaaaggaacactagtcatatttcagtcagattagggtctgccctaatgagttcatcttaacttgattatttctgtaaagattctatttccaaataaggtcttggggcgcctggccccaacagacagcctcttaagctcgttaagaaaataaaaacaaatcttcagaggccataaattagacagcagtaatgaaccagaatgctgtagctgccctaagggtatttcctaaaatcaagaatctaaaaccttggagattgaatggtcatttgtggagttggatgggcaagccctagggtctgaagaaggtgtagagtccaccaaataaaataaagaccccattcttattgaaagggtggactagaaaataaaattctgggccgggcgtggtggtttatgcctgtaatcccagcactttgggaggctgaggcaggcggatcacgaggtcaggagatcgagaccatcctggctaacatggtgaaaccccgtctccactaaaaatacaaaaaatcagccaggcgtggtggtgcacgcctgtagtcccagctactcaggaggctgaggcaggagaatggcgtgaacctgggcggtggagcttgcagtgagccgagatggcgccactgccctccagcctgggtgacagagcaagacttggtctcaaaaaataaaataaaaataaataaataaataaatttaaaaggctatctgttggggttcctccagcatttttggtgttttgtagcgagagggattttcagagtgagattcctaaaactcaaagttgatcctgatgctcttctgtgtgaaactgttctatagcttctccattgcactcagggtgatgtccactccctgagcctgacacctcagatccttcactgcctggccctacccaacttccctagggtccctttctggctttttcctgcctgctcggccctctggctgtaccagccaactttctacttccttgaaatgccaagttctcccctctagacctctctcatggaggtggtggtgatgatgaacaaaccatatgtgtgagatgcttagtacaatgccaggcattgccaagagtgcagtaaatattaggtatgaacaatcatggaaataataattatgatgatgttggccagacatggtggctcatgcctgtaatcccagcactttgggaggccaaggcaggcagatcacttcgggtcaggagtctgagaccagcccggccaacatggtgaaaccccatctctactgaaaatacaaaatttagccaggtgtggtggcccgcgcctgtaatcccagctactcaggaggctgaggcaggagaatcgcttgaacctgggagacagaggttactgtgagccgaggttgcgccattgcactccagcctgggagacaagagcgagactccgtctcaataataatagtaatgcaatgtttatcttacccattcccaaatcttcaaggacattgggctttcttggaagttctactcatctggaaaaaataattcccctggggccgtgattctccactggtgcagttttccctctaaggggaagttggcaaagtgtgaagactttttttttttttttttttgagacagagtttcgctcttgttgcccaggctggagtacaatggcatgatctctgctcattgaaagctctgcctcccaggttcaagcgattctcctgcctcagcctctgcggtagctgggattacaggcatgcagcaccacggccagctaattttgtatttttagtggagatggggtttctccatgttggtcaggctggtctcgaactcctgacctcaggtgatccacccaccttggcctcccaatgtgctgggattacaggcatgagccaccgctcccgaccagaagacatttttggttgttacaactagagaggtgggttctactgccatttagtgcatagaagccagggatgctggttaacatcctaccgtgcacaaggcagcccccttctccccgctgcccccacacaccaagaatgctctgacccaaatgtcagtattgccgtgggtgaacaggccctgcgccaggtgtatgtatatcttgctcaggaatgcttttgagggagggctttagaagataaactcaagataataaactccactcaagttcgcagtctatgtcctaacgtactggatgcactttgggaaaatacacagagaccgccccattgagaacaagcaaaggctgtttattccgagatttctgtagtccagtagtacgagagtcagctaccatcatcactcgcgttggctcagactcaaaggcaggcagagaagtggggaaggtttatagaggaaaaaaagagaaggctacaggtaagtcctgcttggaggctgttgcacggatgggcaagctgtaggtggctaactaggagcggggtatcctgtgtgattggttaggggtacctattggcttctacctgttggtcctaagttggaagtagggacaaaaattaaggaagctgtcaattactaactaagtcctgctgtcttggttcaattgctgcatggatcattctttggctttctggattggttgctataaatcgtgggtcagaattcttcttcttcttcttttttttttttttttttttgagacacagtcttgctctgttgccaggctggagtgcagtggcacaatctcagctcactgcaacctctgcctcccaggttcaagtgattctcatgcctcagcctcccaagtagctgggattacaggtgtgcaccaccacacctgcctaatttaatttttgtattttttttttttttttgagatggagtctcactctgttgccaggctggagtgcagtagcacaatctcagctgtctgcaacctctgcctcccaggttcaggtgattcccctgcctcagcctcctgagtagctgtgattacaggcatccaccaccatgcatggctaattttttttttttttttgtattttagtatagacaggtttcaccatgtttgccaggctggtctcgaattcctgacctcaagagatccgcccgcctcagcctcccaaagtgctgggattacagacgtgagccaccacgcccagcccagagttctctttttataggtgttctggcccttgtctatttgtatatccagtctctccatccttctgcttgactttgcagatcaactcccttctcctgacctggaccttgtggatcctgaggcagaggctttccagtgttaatgccgaagtctcaacgctaaaagacaccaggtaaagccctctttcacctccccccctcttttaatttcctctttcttcttcccagaaaagttctttgagcacttcttgtgtgctgggtcctatgcctgagacagaggtgatgaggtctgtttagcatatcacaccatctagatctggaggcttaaagtccagctcaactatttacgagctgtgtgaccttaggcaagttacgtaacctctcagaagcccatttgcctcacctacagaatggggatattaacattgcttattttaggtgccttacaaagcatttagcacggttactaggaacagtgagtgtttcatatactacaactcttaataaattttctaatttttctctgtgtatacttatatgtgcacatttacaagaaactgaatcatactattttgttttttatggttttttttctctcgagaatgtcctgatgatttctgacttcattagatattattctacaatatggtgtaaatttgtagcacattgtatttaagtcataccatattcatggacacttaatttgcttctatgtgtttttggttttggtttgttctctgtataaacaatactgccttgagcacccttgtaggtaaatccttccacaccatggttatttaattacaacactaaacatgaaactacccaaatccaactgcctgaagagtaggttggactgtaatgcttttagaatgtgcgtcgtaaattgattttcagaaaatttgtttccgacggtgagaatacctatttacttgcaacattgtcaacactggagtttattgtttttgatgtattttctgctgatttaatgcgtgaaatattctatctcattacttttgttatacatattttatattagggatttgggacttcttaaatatttttacaggtcaattgtgtttcctaacttccccactcaactactgttcattttaagaaacttcagcaaccatcatctaggttttattgtcagtaacctaataacattctttgcttcttttttcttcggtatccaatcccttatccattttaaatatgtttgaaaagttagtacaaaagtcaaaaaggaggcctggtgtggtggctcatgcctgtattcccagcagtttgggaggctgaggcaggtggatcacgaggtcaggagatcgagatcatcctggctaacatggtgaaaccctgtctttactaaaaatacaaaaaattagccgggcatggtggtgggcacctgtagtcccagctacttgggaggctgaggcaggagaatagcttgaacccaggaggcggagcttgcagtgagccaagatcacgccactgcactccagcctgggtgacagagtgacactccatctccaaaaaaaaaaaaagacaaaaaggtaaaacaaagttgatacatacacatactcatagcagaaaatgtaagcaataagtttcacatcagatgaaattcaccattttaaccattttaaagcgtgtaactcggtggcttttcgtacattcacagtgttgggcagtgaccgccactatctagtggcaaatccttgttttttttttttttttgagacagagtctctctctcgcccaggctagagggcattggcacggtctcgactcactgcaacctccgcctcccaggttcaagcgattctcctgcctcagcctcctgggtagctgggattacaggcatctgccaccgtgcccggctaatttttctatttttagtagagacgggttttcaccatgttaaccaggctgggctcgaactcctgtcctcaggtgatccaccagccttggcctcccaaagtgctgggattacaagcacccaccaccacacccagctaatttttgtatttttagtagagatgggttttcaccatgttggccaggctggtctcgaacttctgtcctcaggtgacctgcccacctcggcctcccaaagtgctgggattacaggcttgagccaccgcacccagcctgattgcatttaaatgtctataggatttgattttgcaacacctaggcttggagaccccaccctacatttgtccacacctaggtggcaaattggagagtggccacctcagaccattcctggaagtgtggcctgcaaggacaatagccacctcccagagccttacatgctgtacatcttctccccaggttactgaccttcaaggcctttgcccagctcttcatcctgggctgctcctgggtgctgggcatttttcagattggacctgtggcaggtgtcatggcttacctgttcaccatcatcaacagcctgcagggggccttcatcttcctcatccactgtctgctcaacggccaggtgtgtagctgctgccctccccatccccctcctcccatccccctctccccccttccccaccgcatccctccacccaacatccctgtcactggaccatttccctgcatctggatgatgtgtctccttctccaggtacgagaagaatacaagaggtggatcactgggaagacgaagcccagctcccagtcccagacctcaaggatcttgctgtcctccatgccatccgcttccaagacggtgagagactgcatgctccctgcaggtgctggtcgagggaggtgccggcctcttggtgacactcagctctgccacgtgttgggtactgaatgggagctgagggtgcccaccctagttagctcatggatgaagtgtggagttgaagactggggatttatatgtatatattagcagacacacacacattatctatctctctatttaaataaaatttcaagaataagacatatataatttataacagatttacatagatacatttgtatatgaattatgtaacatattaaaaataatacatatttatatgttatgtttataaaatacatttatatgcacttattatatacatataatgtataatattatatacatataaatgtaagatgtaagtttaaatatagataccggctgggcgcggtggctcacacctgtaatcccaacactttgggaggctaaggtgggcagattacctgaggccaggagttcgagaccaacctggccaacatggcaaaacccccatctctattaaaaatacaaaattagccgggcatggtggcaggtgtctgtaatcccagctactcatgaggctgaggcaggagaattgcttgaacccaagaggcggaggttgcagtgagcagagattgtgccattgcactccagcctgggcaaaaagagcgaaactccatctcaaaaaaaaattaaataaatatagatatcttcacatgtatatttatatagagaaaatttttatgtattatggataacatttatatatgtagattttcaggaatattgaaatattggaatgaatatgcaaatggaggcaaagctggttttcccactagaatgtcttatttttttcaacaatgtattccacgcccctaaaatgctgtctagcacacagtaagttcttagtgaatattttctgagtaaataataattcaatagcttagtttcctcactgataaaatggggataatggtaatccttaccttggaaggttatactagatattagatgaaccagtatgcaatggggttggaagagtgcctcggacatagcaggatctcagtgttaagccttgcagaagtccagtgaggtaggtatcactgctctattttcttttttctttctttctttctttctttttttcttttttttttttgagatggagtctcgctctgtaacccaggctggagtgcagtggtgtgatcttggctcattgcaacctctgcctcctgggttcaagcgattttcctgcctcagcctcccaagtagctgggattacaggcgcccgccagcacacccagataaattttgtatttttagtagagacagggtttcatgatgttggccaggttggtctcgaactcctgacctcaggtgatccacctgcctcagcctcccaaagttctgggattacaggtgtgagccaccacgcccagctggtctattttcattatgaggaaaccgaatgtcatagaggttaagtccagtgatttcagaatgagccacaggaatcaccccactggaaaaattgcccatatcatggatgacatattctcttggcaatacatttttaaacataatgcagtttactatagttttaatgaaaaagacagtataggtatagaacattttagaaaacatttgtaagcattgaaaacaaataaaatttcccattatcccaccacatacagatcccagtgagtcatatttttggatgcaagcaccttagatccagtggcttaattaaatagggaaatgattttccttgcaagaagtccagaattaggtgttgcgaatattgctggtgttgctggttctatgcttagtggtgttgtaaaggctctaaactaagaatctgggttttccccagttttccattccaccatcaacatgttgacattttattgtattttcatggttgcaatatggttgccacagctccagacatcatgactatgttcaagtcaagaagaagagggatggacaggaccagaaagcccttctttcatgtctttgtctttaacagtaaatgaaagcccagaaaactctcagatttccctttacctaattggtcagaagtgtatcatgtgaccactcatatgggcaaaaaattttgaaccaacagctgtttggcttcctaaagtccagagtgggcgctgtcaatgctgaggaggttgagaatggcttttgggttttccaactctgcctgccacactagggacaatcgcatttaacattttagtgtttatccttctagtctttgttactgtatttttaatacttctgtccctgtagacatgacccttggaatcacgtttgtattaattctgctgcagactctgaggaaattcttttctctctcacagggttaaagtcctttcttgctttcaaatatgctatggagccacagttgaggacagtagtttcctgcaggagcctaccctgaaatctcttctcagcttaacatggaaatgaggatcccaccagccccagaaccctctggggaagaatgttgggggcggtcttcctgtggttgtatgcactgatgagaaatcaggcgtttctgctccaaacgaccattttatcttcgtgctctgcaacttcttcaattccagagtttctgagaacagacccaaattcaatggcatgaccaagaacacctggctaccattttgttttctcctgcccttgttggtgcatggttctaagcatgcccctccagagcctatcatacgcctgatacagagaacctctcaataaatgatttgtcgcctgtctgactgatttaccctaggataaagactctttgtgattttaaagaaatggtcagtaaaactgtaatgagagtcccagggaaccaagacggcacatagacagataagctactttggcacaaacacttaaaaatagttgtgttggtaagtagggggatgtttgatgtagcagaattctagcactccctggagggttgaagcacttggtgacaacaacctttggaaagtgctttggtttcctgaggtccttcaggtaaccaagacctccctgttttctagaaactttctaatgacttggctaggatttaggattttctctatcacagttatcgctacctatccttaattttttttttttttttgacagagtctcggtctgttgcccaggccagagtgcagtggcatgatctcggctcattgcaacctctgcctcccgggtgcaagtgattctcctgcctcagcctcccaagtagctggactgcaggcgtgcaccaccacgcctggctaatttttgtatttttagtagagacggagtttcagcatgttggccaggctgatcttgcactcctgacctcagatgatccacccgcctcaccctcccaaagtgctgggattacaggcatgagccactgcgcccggccaccatccttaaattcttgagcttgggagagaagaagatgaaggtttaaatgcaggtattttcacttctatgggcactgtaaaacctcccaatccaaagcgtggtccctggatcatcagcatcacctgagagcttgttagaaaagcaaagaagaatctcagaccccactccagacctcctagatcaggacttgcatgttaacatccccaggggatgaatataaccatgggtgtctgaaaagcactattgtagaacattcttctgtttgccatgctgacagcagagcttgtctttaaagccagagagaaatgtcttcttcttgacttggaccctttgcatcttctcttagaataacttccctgaaaactcaattgatgtcttctgtctctttgagttgcagtgtagtcatcccctctgctaggaagcattctttgaatctcctacagtagaatttggcattatttttgtgtgtgccaaaaagcttcatgctttctcaccctgtattatgatttctctttttgttgggtgtctccaacatagactgtgagcttcgtaagtacagagatttgcattaagtagcgtctcaacaaatatgttgaatgaatgaatgaatgaatgattagaatgattactcttcattttgaagacaggggaactgaagctcagagaggttaagtgactatcccaggatcacacagccacataggtcgttgagctgggttttgagctcttgaccataaagctccttctccagatgccttgttcccctttttctcttcctttcgtgccaggaatacttagtttagggttacagagactagaataatatttactctgagtcacctaagcagttaggattcaattagctcagtcatatcatgcactggacaatttgttaacaatattaaactcagttgatggaggctctgtctttgttattcttggcagcctaacttgggaggtgggacacatgtttgtgaacaagagttcatctatgataaattagtcttcaacgcttggcttatccagagtgctcaatacagaggtgatagttcttagagagatggaagcaagagatggcactgctcctatccatagccaattgtcataggtcaatggcatcaatgggcccaataatggtctccatttagccacatccctttcctgtaactttgtaactctctccttgtctgactctggggttggacttgagatttgctgcagccagtggaaggttaggaaatgtgactggaacgtaagtttcaaaatcgtatgtgtaatccttcttaccagttacacgattacatttgctcaccttgcttccttacccccaccatgtgaacatgcccaagcccgcctgctggagggacatgagaaacacagaatgaagggtaagtcaccgcagttacactggtggaggttgtcctcagccagccaccatgccaacttgctgctttaatcacaggagagagcccagccaacatcagcagacctgctcagccaacccataaacagactgaggagcagcaagaaagtatcatttttcagacactgagtttcaggagttatttgttatgaagcatttatttgtagcaattgctgatggatacaacaaccaaagtatggtcaacattctgcattggactgcaacaatttggaatgtaaaaagaaagaattttgatctcaatttcttctgagatatcaggataataaattctgtactacttgaataaagttttttcctgagagaagatttgcctaaggctttgtctgtctgtacaacggtgttacatgttggtctgaaatatagtcaccttaagaagctctatatttctaaggtaagtggataaaggtgtgacctccatgcaggatttttttcgtactacacacatcaagctatacttggtacattttttttacccttgtggtctcatatgtctccgctagagggagaaaggagacaattaaaaaaaaaatgcggcccggcgcggtggctcacgcctgtaatcccagcactttgggaggctgaggcgggcggatcacgaggtcaggagattgagaacatcctggctcacccggtgaaaccccgactctactaaaaatacaaaaaaattagccgggcgtggtggtgggcgcctgtagtcccagctactagggaggctgaggcaggagaatggcgtgaacccgggaggtggagcttgcagtgagccgagatcgtgccactgcactccagcctgggtgacagagcgagactccatctcaaaaaaaaaaaaaaaaaaaatgcatgagtagaagaaatacgttctgaagttcactggtagagtagggtgactattgttagcaacactgtattgcatatttcaaaatatctagcagagaaaacttgaaatgtttccaacagctagaaatgatcaatgatcaagatggtggacaccccaaataccctgtctttatcattgcaaactctgcatgcaacaaaatatcacatgtaccccataaatatgtacagatattatatatggaaaaccctaagtggctgcaaatcccatgaatataatgtgaaataactttgctatcttataatccaaataattgtgtacagaaaattacagatccattcactcaaaaaatatttattggccgggtgctgtggctcacgcctgtaatcccagcactttgggaggtcggagcaggctgatcatgagaccaggagattgagaccatcctggctaacacgatgaaaccccgtctctactaaaaatacaaaaatcagccgggcgtggtggcgggcgcctgtagtcccagctactcgggaggctgggacaggagaatcgcttgaatccgggaggcggagcttacagtgagccgagatcgcgccactgcactccagcctgggtgatagagtgagactctgtctcagaaaaaaaaatgtattgaccacctctattgtgcttccccctcaaacactgaagtagttaaaaacattgaaacattgaaaagtaattattttagaacctaaaaagtattttaaatttaagtattttatagttcccaaactagaattattaaaattatactttactggttctaatggaagtaaactcatcaataacagtttttaaattggtgtctgaaaagaaaaatcattaaaaaaatattatttggccatacaaaaggagattcctgccatttgcagcaacaagaatgaacctagaggacattacgctaaatgaaataagccaggcacagaaggacaaatactgcatgatctcatatgtgaaatctgagaaaatcaaacacactgaaagaatagaataacggttatgaggaacagggatgaggtgagggagaaatggagagaagtaggtcaaagggcacatagttgcagttatgtaggaaaaataagtttagaaatctaatgtacagcataaagactatagctaatgatattatattgtatttatttcatttatttggatattttctctattttcttagtctagctaaaggtttgtcaattttatcttttcaaaaaaaccaactcttcttttcattgattttttgacttgcttttcgtctgtattttgtttatttatgctctgagtcttattatttacttccttttaccaatttttggcttactgtgttcttattcttctaattcctcggggtgcacagttgggttgtttattagaaacctttcttctttttgaggtagggtgtttattgctatgaactttccttttgctatgtgttaggggtttctgtatgatgtgtttccattttcattggtctcaaggaatttttaaatttcccttttaatttcttcaatgagccatcagttatttaagagcataaggtctaatttccacatagctctaagttttccaaggtttttatagttgttgatttttagttttattccactgtggtccaaaaagatacttgatatgatctctatcttcttaaatatgttaagacttgttctgaccaggcgcagtggctcacgcctgtaatcccagcactttgggaggcccaggtgggtggatcatgaggtcaggagattgagaccatcctggctaacacggtgaaaccccatctctactaaaaatacaaaaaaaaaattagccgtgcatggtggcagacacctatagtcccagctactcgggaggctaaggcagaagaatggcatgaacctgggaggcagaggttgcagtgagctgagattgtgccactgcactccaacctgggcaacagagcgagagtctcaaaaaaaaaaaaaaaaaaaagacattacatggacactaacatgatctatcctagaaaatgttccacgtatagttgagaagaaagtatactcttcactggttggttggaatgtcctgtaaatgtgtgctagacccatttggtctatggaatagtttaaatccatgtgtatttgtttatttcttgactagacaatctgtctattgttgaaagtgggatgtcaaagtcccctataagtactgaattgcagtctatctatcccttagatataataacatttgctttatatatttggatgctttggcgttgggtgtatatatgttgatgatggttatagcctcttgttgaactgctatatcttttttttttttttttgagacagagtcttgctctgtcgcccaggctggagtgcagtggtgctatctgggctcactgcaagctccgtctcctgggttcactgaactgctatatctttaacattagctaatgatcttctttggttctttttgttacgatagtttttgacttatcatcaattttatctggtataagtatgacttataccactcacttttggtttctctttgcatgatatatctttatccatcccttcactttcagtctgtttgtctttaatggtgaggtgagtctcttgtaagaagcatacagtttggtcttttaaaaatttcattcagccactcaatatattttttttctttttctttattttttttttttttgagatggagtctcactctgtcatccaggctggagtgcagtggtacaatctctgctcactgcaacctccacttcctgggctcaaacaattctcctgtctcagcctcctgagtagctgggactaccggcatgcaccaccacacccagctaattttttttttgtatttttagtagagacggggtttcaccatgttagccaggctggtctcaaactcctgacctcaggtgatccacccacctcagcctctcaaagtgctgggattacatgcatgagctactgcacctagccccaaatattttaaaacttttttttttgaagctcttcatggtaatctagggtgtttatgtgtcataaagtatttaatcccagtttgtatcatttctaaattttcagtgctataaacaacactgtaatgaacatctttgagctaaaattttaacactctactgcataagtgactttaaaattagtaataggttataagtgggaagaaatttatatgttccccttagtgtttgattaaagacaaacatttttcactatacaagggctgccaaaactttcccaaactgtaaaaaacaaaccattagaggctgggcatggtggttcatgcctgtaatcctagcactttgggaggctgaggtgggtgaatgacttgagcccaggagttcaagactagcctgggcaacgtggcgaaaccctgtctctaccaaaaatacaaaaattagccagtctcataactggtctctaaataaataaatagataaaaatttaaaataaaataattttaaaagtagccattagaaacatagtaatttggctgggtgtggtggctcacacctgtaatcccagcactttgggaggctgaggcgggtggatcacaaggtcaggagatagagaccatcctggctaacacagtgaaaccccgtctctactaaaaatacaaaaaaattagccaggcgtggtggtgggtacctgtagtcccagctactcaggaggctgaggcaggagaatggtgtgaacctgggaggcgaagcttgcagtgagccgagaccacgccactgcactccagcctgggcgacagagcgagactccatctcataaaaaaaaataaataaatagaccaatatagtaatttgaagtttatttaatttttgctcccagaaaatctttccatcatcagttctaagccatctggttgccttctgatgtgacctttctgttccattttgcctaaagttattaactttttatttgtaatacttggtatgttggatcaatttcagatgagttcattgtctcatttatctctgtaagtttactatccagcagaagattggggtcactgattgggttaataatatttgttaaatgaatatatccaggaaagagagtgtgtctatctactgcacagcaacagaacactattctgatattctgtgtcgtgaagtgatcactcttggttttataaataacagattctgattttcagaatcttcaaaacagatctcttttgtttaattttccagtaacaataaccctgtgctcattctattactaatattactatttataaaatgacaataagtgattgaggtcaggtgttctaaaagcagagcctgagaccaggattgtggtgcccatgatttactgagggagtgcttggaggagaaaagtgagggagtcaggatggggttgggaagttggagggtaaggctatggtctcagctggaagtgattgcagcctgatctccggggagcgctggagcatgagtcatacctcagagttggtctcactttgagtcaagggcccaagccttgtttatgcctgtgtcagtcaattattggctacattgccccgacaatggtagggcagtgcgtcaccttccagatggagcacttcctgttcagctgaaaccagtttcctggagaagaggatgggggctgaaaaggaaattaggaacgggcagcaacagtaccagctactctgctcatgatcatcaaatatgaaaaagaaagctatgagtcccttagatacttgattgaagttcactgtcatgagattttgaactgcattcaaaaaagagtattgtttctaatgatattgcaaacttcttagacattccagtaagcatttcacttactaaaaaaaaaaaaaaaaaatttttttctgccattcacttagacttctttttttaatgtttattttaggttcagggttacatgtgcaggttagttatataggtaagttgcatgtcatggggatttcatgcacagactttttttaatcatccaggtaataagcttactacctgataggtagttttttgatcctctcctctcaccttccaccctcaagaaggacctggtatctgttgtttgttcccttgtttttttgtttttgagatggagtcttgctctgttgcccaggctggagtgcagtggtgtgatctcggctcgtcacaacctctgccttccgggttcaagcaattctcctgcctcagcaggacacccaatcccagggaagttcaaagctaacataagatagaattcagttattcccctagttccttgtaattgaatagaaacattttaccaacttatgttaatattatacaattttaatccctggatattggaactgggtctgactcactaactgaaaactttcacgttttgtgctattcacaatagcacgtttcagagctattgtttttctcatttttcttgccctaaatcacctcagacatctgcatttattactgcaactttgtccttacctataaactaatccctagaccaatggttttcaactgggagcatttttgttcccaggtggcaatgtctggaagcatatatatatacattatatatatatacacattatatatatatatacacattatatatatgcacattatatatatatacacattatatatatatacattatatatatacacaatatatatacattatatatatacattatatatatatgaaataaaaaatatatatttcaaataaaaaatatatatttcaaattaaaaatatattttttcaaataaaaaatatttatatttcaaataaaaatatatatatatatatttttaagacagggtctctctctgtagcccaggctggagtgcagtggcacgatctcggctccctgcagcctccacctcctgggttcaagcaatcctcccacctcagcctcctgaatagctgggattataggcgtgagccactgcacccagctgatttgttttgtatttttagtagatacagggtttcaccatgttggccaggctggaactcgaactcctggtctcaagtgatccgcccacctcagcctcccaaagtgccagcatcacaggtgtgaggcactgcaccccccctctggaggcatttttgattgtcatgactggtggggaagtgtcactggcacctactgaataaggccaagctgcttctaaacaccttacaatacaaagaacaaccccttacaaataagaaattatcagccggcgcagtggctcacacctgtaatcctagcactttgggaagccgaggcaggtggatcacgaggtcaagagatcgagaccatcctggtcaacatggtgaaaccccgtctctactaaaaacacaaaaattagctgggcgtggtggcatgcgcctgtagtcccagctattcagtaggctgaggcaggagaatcgcttgaacccgcgaggcggaggttgcagtgagccaagattgcgccactgtactccagcctgggcaacaaagcgagactccgtcgcaagaaaataaataaataaataaattatccagcccaaaatatcaatagcgcagagtttgagacataataattaggtggaggccgagaatatttaatgtatcatctctgccattcttgccttcacgaattttctaattcagggaggcaggatttacaaacacacgtgacatcatttgtgaaacagcacaccatgtagaagggtaagtcatgttgtacagacctgaataaattgagtttaaaagatggatttatttgaaagcctgaataagaaatcggttttgaaggaagcagaagccagattggctcttaaaaagaatggaaaagaatgagagaggcaggaaggaaagaaagcagccgaccgggagtggtggctcacgcctgtaatcacagcactttgggaggctgaggcgggcggatcacctgagctcaggagttcgagaccagcctggccaacagggagaaacctcatctttactaaaaatacaaaattagctgggtgtggtggcgcatgcctgtaatcccagctactcgggaggctgaggcaggagaatcacttggacccgggaggtggaagttgcagtgagctgagattgtgccattgcattccagcctgggcaacaagagcaaaactccatcaaaaaaaaaaaaaaaaaaaaaaagagagagagagaaagaaaaaaaaaagaacaagaaaaaaagaagaaagcagccttcaagttggaagggaggaaaaatggccaatagaggagtctgaattcaaatctgcaacacctagaatacatggcttatttattctgtctttcttcaactgccatggaccagagagcaatcgcaacatgactaggaattcggcacaagggtttctcagctgcccaggaatattgcattttacgaagcctttattcgtgtacatttgaaattatgcaaaacaaaaagttgcgctgcatgcacacattttgcaaccatgtgaatatcccttcattttcccttttccaaaggaatcccataacttcaaagccagcaggtggagtggatgtacactactctgtttatatctatggaggagacatttgctttaattaagcagaaaagtcctcaaccctttgtctgcaaccctagaagaagacctcacatgattttctttttttttttttttttttgagacagagtaccacggcctcccaggctggagtgcagtggtgcaatcatagctcactatagcctcgaattcctggggctcaagcaatcctaccgcctcagcctcctgtgtagtggggagtacagcaatgcaccactatgcttagctaattttgtaaattttttgtagatatggggtctcactatgttttccagggcgtctcaaactcctggcctcaaacaatcctcctacctcagccccccaaggtgctgagattacaggcatgagccaccgcgcctggtttgaaatttcttcaaataaatgatgataactcttgcctattttaacattgacagtcattagcatttaaaatctttttggagctgttctgtcataacaatcatccacacatttattaatatgctgaaaacatacctaaaaaccagtaactttgtaaaagtaattagacatggtaaaacgaaaaaatgagtccgaatgacccacgttttttgtttccagacatttgtactgggacatgttcaagaggacactaagaaaacaaaatgatctttaacccatgtgtacatgtaggttccaaaagtctcaggcagaccgggctaggtcgctcacacctgtcatcctagcactttgggaggccaaggagggtggattgcctgagacgaggagttcaagaccaacgtggccaacatggtgaaaccctgtctctactaaaaatacacaacatgagctgggcgtggtggcaggcgcctgtaatcccagctactcaggaggctaaggcaggagaatctcttgaacttgggaagcagaggttgcggtgagcagagatcatgtcactgcattccagcctgggcaaccagagcaaaaccctgtctcaaaaaaaaataaataaataaataaaaaagtctcaggcaaagaaaatggggaaaatgtcagtgtcttggacaaaagagcctgcgcagtgacaatacacccctaagctaggatgataatgcatttttgtttttggttttttatttatttatttatttattattattatactttaagttttagggtacatgtgcacaatgtgcaggttagttacatatgtatacatgtgccttgctggtgtgctgcacccactaactcgtcatctagcattaggtatatctcccagtgctatccctccctcctccccccaccccacaacagtccccagagtgtgatgttccccttcctgtgtccatgtgttctcattgttcaattcccacctatgagtgagaatatgcggtgtttggttttttgttcttgcgatagtttactgagaatgatgatttcccatttcatccatgtccctacaaaggacatgaactcatcattttttatggctgcatagtattccatggtgtatatgtgccacattttcttaatccagtctatcattgttggacatttgggttggttccaagtctttgctattgtgaataatgccacaataaacatacgtgtgcatgtgtctttatagcagcatgatttatagtcctttgggtatatacccagtaatgggatagctgtgtcaaatggtatttctagttctagatccctgaggaatcgccacactgacttccacgatggttgaactagtttacagtcccaccaacagtgtaaaagtgttcctatttctccacatcctctccagcacctgataatgcatttttgtattgcaaaatgcaacaccctctttaatactgatccatatgaaaattgttgaattatgtgaatgtggagtgttaatgtaagatctttgggagcataaaatacagcagagaggccagaaagggaactatgagctgaatccagatgccagttagtgagtttctggcaaggtggcagtagctgcaagaagaaaatccacttctcccgcccgccatctttaaaatgcatccttccgacacttcattgcacgtgccacactactggactctggatctaagaattctcccaaatgtcttgttctttctatgaacataaaaagccaaaataggtgaatgagcctagacttttcacaggaaagctagaaatagtggcatttgtccaatctatgtgtgaccacaggggcgctgtagacaaacggaaaggagcggtaacttccgggtcattgccatggcacttgccaggtcagttcatctttagccaagcagcagagacgagatgaacctgtggctgcggttgcttggttgactctgcagatgatgatgcagtgcctcctttatgaaagatttctgaggacttccccacttcttcctacttgcggggaagataataaggagaaaaggtgacagagaaattaactaaaacttctaacttgcccagagatgacaagctaggatttctgttaggtccaaagctcaatatctgacattacaacttcccatcctccaaaaaaaactccaccatctaataatggttattttatttgatcttttcacaaacatttacaggggcttcctgtggtgccaggcagccttctaagcgcttaacttatttgacatcatttaatcttcacaatgagaagtgctacccttgctaagaagctctttatcccaaataaagctcatatctttgtaatagctccatggtcttagcattcaggctgccgcaaggggcaaacccagtttcacgagtcacagcacttaggaatctgtggtttctgaccaaaaagagtctcttcctagccctccaaatctaggtaatttcacaaaccggaggtcgtttttatcatacacagccttcagatttttggtcaagtgccagcttcttgtagtcaccttatttaaaactggaatcctcccaccctgtcattcctggctgctctccattgctctattttttctaaagcatttatcactttctaataccataaaattcactttttggggtctgttgtcagttccctcacccaactagaatgttagctctgtgaggtcaaggactactgtcagtgggtccactgatggttctccagcacctaaacagtgcctggcacatagcggacaataaataggtgttaaatgagtgttgttaataaattaaactttttttgttaaatatcccttggatgtttgttgaaggaagaaatgaaaagagagaggaagagaaggagggagtgatagaaagaatgaaacagagagttagaaacgagagaggaggaagggagagaaaaagatagatggtgtaaaagagagtgagaaagaaataaaacgtaaggaaggagagggaaaccaggaatgagggagaggaagagactgagagagagcaagaaaaaagggagaaaaggaaggaaggaaggaggaaaggagggaaggaaggagggagggagggaagaaaggagggaggaaggatggaaggaaggaaggaagaaaggaagggtgggtgggttctggttttggtctcaaaacccagaaacttcagctgcataatacaggaacctaatgcaatttctcttttctttcagatcaaggaaccagaaagcttctagaggcatgagatgtcggattccaataaagcactcagaaggagctgatcttaccgttttggtttgggtagtagagcgagacatctcagtgctttcagtttctacccctttccgcatcccactaaaccactttttatattccattcgaacctggaaatttgagtggagaggtccgtgttacatccagagcttggtttgggagaaaggatcctaaaatgggaggctaaagataaagacaccaagccctactctctagttttccatataatcttggccatgcccatgttgattcattttatttaaactcaaacttctcagttgtaaaaaagatgtgtattaaatatcagacactataggactcaatagatgatgatgatgatggtgatgaaggtgactgttgatgatagtggtggtggtaatgaaagtaattaagatgatgatggtgatgatgaaggtgatggtaatggtgatgatggtgatgaaggtgataatgatgaagatgatgataaaggtaatgaaattgatgatggtgaaggtgatggtaatggtgatgatggtgagggtgatgatgaagatgatgacaatgaaggtgatgatagtgatgatgatggtgaaggtgatgatgatgaagttgatgataatggaacggacgatggtaaaagtagcggtgatgattaaaatgatcatgatgagggtgatgatggtgatgttgatgaaggtgatggtagtgaaggtgatgatgaaggtcatggtgatggtggtgatagtgatgatgaaagtaatgtgaaggtgatgatgaaggtgatggtaatggtgatgatggtgatagtgatgatggtgatggtgatgatggtgatggtgatgatgaagatgatgaaggtgatgatggtgaaggtgatgattataaaggtgatggtgatgacagtgatgatgataaaggtgataatgaaggttatggtaatggtgatgatggtgatggtgatgatagtaaagatgatgaaggtgtgataaaggtaatgaaggtggtgatggtgaaggtgattattataaagatgataatggtgataatgacaaaagtgactatggtgatgatggttagatgataatggtgggggtgttggtgattatatgatggtgaaggtcaccatttattgaacactagctatattcaagacactgtatatgcaatatatcatttaattcttacataaatggagtaagaaagacatttctcctacccacaattaaagatccgaagttgagactcttgcagttaaattgatatgcccaaggtcacacagccaggactcgaaaccttgtcatcttactcagagccctgacgctaaccattacaatcacccatcctctgtgattccaagaattgccttcctctaacctccttaacatgctaaaaatgacatttaaagatttaatgctcgacatcatttcacaaggacaattaaattatattttacttcttctgtgagtgagaagtaccaagcatgaaggcactaaaagattgaagagaaattaatgacgtgttaagatagccttttgccactagcgtcttaactgctggtagttttattcaacagcaaagggaaaatgccaggaaaatttgtcctaattttctatggagagtaaaattgaaataacactcactgagatcttaataacaacactaactgagatcttaatgtgtgctaaggactatgttaggagtttgcactgattcatttaagtcttcaaccctgtaatgaaggcatcaccacatctgcagatgagaaaactacagatgatgctcagaaaggataggcggtttacccagagtcacacagccacctactcagtggaagaactgggattagacttgaagtctctttgagtttgtggtagattgtgccacatatttcagcatcacttcttgtagtgcccctcactacagaaggattattcatccccttcttggtgaactgaggtatggccatgtgacttgctttgactaattaaatgagagcagaacagaagtgcaccactactaggtagaagctttaagagagctaagctgtgctttcccacaatctccttttcctgtgccatgaaaccatcaatgttctaaaaagggggccacaccttcagcctgcactccagaggaaagacgatgtgggttaagtcacagttatgtagcacaagcaagaaataaatatttattgttttaagttgctaagattaagtgtgggaggcaaggggctatttgttattgcagcataatccactttatcctgactgacccatgctcttcaggatatgttaggatgctaaacagatgaaacccacagcatacagcataccccagcagcacctaaaccctcatccccaaatcaagacaaacccaaaatacaattataaaaggtcagggaagagtgagaacgtgaacaaccattcaattagactttgggactaggctgatgacagacaaaataattagccttacctggcgattaaggagacagtgtaccacaaagagcaacactccctgaagggtgttgatgatggtgaatgagtatgcaatgattgatccaatcgtcttccctacttcttcaaccataaaaaaaccaaggccccaagaacagcccaggataaatagctgagaaatggctttaaatgtcatgactctgcagggaataaaagtaataataactacggtttaccaggtatccactacaagtgctaactaaatgctctgtgtgcattcccttatttaaatctcacaacagcttcatgcagttaagtgacgtatacaacaaggtcacacagcttgaggatgaagtggaacccatgacttcagtcatggcaaatcactgagaatagtgctttctccccaccgttgaaaataatttgatttctctgcatgtcttctgcctagattttttggaagatttatgggaaaatgccttctagaaatttgtattaaaacatttgaataatggtgaattcctgactttagaacataacataatgttgggtttcttcacacaaagtatattgtgtttcatataatggagtgggattgttgatggcagctggctgggagagctgatgagtgtgtgtgtgtataggtgtgtgtgtgtgtgacttcactttttactttttgtgttaccccctgggaatataaactctatgagggcagggattttggtctgttttactcactgctttatctccagtccttagaacaatgcctagcacatagtagatactcaataaatattatggtttgtgataaacttgctaattagtccttcctgttcctgatttggttcctaggttttccacaactgctatctagcttggtgatttttcttacatccagccctccttccatttgcacttacagaaagatatatacttatagaaaagacagaaaacctacctatgtccacatttaggagacagcataatcactggtatatgaggattctcccatgacaactttctctttggcctaaatggtgccatatggcttcatccccactgaccatagccagttgccccacagtagacacctgacctataaggagtcaatcaatccattttccccccagccaaccagattttgtctcttaagcatttgaagtaagaggcttggagaatggacctgtgagacgcctttgaggtggctctgccctgttcatcagctgtgggaagtcagtctgcagggagaagaggacagagccaaggtgcaggaaagggagccataaatatgcgattttttttttgagatggagtcttgctctgttgcccaggctggagagcagtggcacgatctcggctcactgcaacctctgcctcctgggttcaagcgattctcctgcctcagcctcccaagtagctaggactacaggcgtgtgccaccaccatgtctggctaatttttgtatttttagtagagacggggtttcaccatgttggccaggatggtctcgatctcttgaccttgtgatccacccacctcggcctcccaaagtgctgggattacaggcatgaaccaccgcgcccagccagatatgcgattccatatcacaatggttaattctggagcttaggagacaaagggactcaagtggatgggggcttctaacagatctggaacaagtctctcaacaactctttcccagcctccccttcctgccatgatgtctgaaatttctagaatccaagtccttcctattgaaagagcatgatgtttccaccatgtcaatgttaacctcggatttattacttaggaaatagacgagatagttaatctctaccccaaagtgtgacattaacctagtgtagcacaacagggtaactgtctattcaccagcaagaggaagaggttggcagcagggcatggctgctgggatgaggtcagacatggagcttgctgtttgcagttctaaggaagaagtgagcccttacagggtaaggaattgagaaatggggggatggggaaacaccaagaagggtggcactttgaccctcaagaattgaggaaaccaaatttaagaaatgtcagactggtctgataagtagaggagtcttgagacagggtctgaaattagacagtcctttaattttcatgcacgtgactcaccaatgcaagatccttacccactcttggggtaaggatccagcatctatcaagattctattgaatattagcttttgtcatcattatttttaatagcatagattggtacccatgagaattgagtttctacaaccaaagaacatggagtccaggtagggtgcggtgtggttcatgcctgtaatcccagcactttgggaggctgaggcgggtggatcatctgaggtcaggagttcgagaccagcctgaccaatatggcaaaagcctgtctctactaaaaatacaaaaattagccaggcatggtggcgtgtgcctgtagtcccagctactcagaaagctgagacaggagaattgcttgaacccaggagaattgcttgaactcgggagtgggaggttgcagtgagacgagatggtgccgctggactccagcctaggcaaaagagtgagactcagtctcaaaaaaaaaaagaaaagaaaagaaaaagaaaaggaaagaaaacggagtccaggggcatatgggctcttggtggagtgagaggaggatgttgatactcttggaattaatttcataataagagtgtgttatacaaaggaggcacttgataaatgtttatttttcttttcttttttttttttgagaccgagtctcgctctgttgcccaggatggagtacagtgacatgatccgtagctcactgcagcctcaacctccccagctcaggtgattctccctttgcagcctcccagatagctgggactgcaggcgcacgccactatgcccagccaattttgtaaatttgttgtagagacaggggtctcagtatgttgccaggctggtcttgagcagctggactcaaacagtcctgtcacctcagcctcctcaagtgctgggattacaagtgtgagtcactacacccagcaggaatatttattgaataaggaaatgaagttacctgaaaatcagagtttctatttcttctataaattgtccttcacatgctctttatcgcgtaccagaataatttatatcatatttctgcttgggttctttctttcccaaaagagcagccacgtaggaataatgtttgggtaccactgattctgatgccttcttacctggtgtcctgaatggtggaaacttctttattgagggaggaaagtttgcttctcaaaatccacagaacttggaagtagaacaccaggtttatctgtgggaaccgcatgaaaaaagtgacttggaattttcttttggagccattttatacaatctaatttgaggagggcctaagaatcttttcccaaaagacacaggttttataaagatggtatgcacatatgttctggtctattacgtacaacacgcagcatataccctgtagcatttggtgcttgattaggtaactatcgaatttatcattcaaaccaggagactttgaaagtggaaaggtgctattaatgtctctaccagggaacaggtgtcatcagaaagtttccggcaaacaggaaaccatgtcaccctgtgtagagaagccaaccattaaatatttgttgaatggaatgaataacagcattttgaaaagaagtcccaggagaggtgatattattacatcaaagcaacaagtgagccaggaggaatccaaggaaagaaaagtggagacagtactttcaggaagaggggctgatcacattaagctgttatttcttatcttcatctcatttccccttagataagaaaaacattttgtatgcttggtcaacctaaggcgggcacacccataaataattatcgcctaccaagataatgactgctactggccccatgaagctccagatgaatcctttatcaagcttgagccaacagctgttgagacagagagaagcattagctgcctcttccttgggagaaggcagagaacttgaatacaggctcctggggcaagatgtgaacagggccaggagttacttcggtcagaatcctgaattttagatggagtcagatgtgagttctcatttgatgcaggtgcatgctctgaggctgagttttttcaagtgtataatagagctaatcaaagtactggaaagattaaatgatgaccgtagctgtctactgaggcttgaagtcagggaatgtcagttctctggcttcattgttctccttctaaatagagttggtcattctaggtcttttgcctcctttatctaaacttcagaatccgtttgtccaatatccacaaaataattttctgggaatttgatttggagtgtgttggatctatagatcaagttgggaagaagtgccatcttgacaacgttgagtcttcttatccatgaacatagaatatctatttggatatcctttgatttttttcatcagaattttgtcactgccttcatatagaacttgtaggaaagattaaataagataatgtgcttaaagtttttgagtacagttcctagcaatgagttaacggtaataaatgtagttagcaagttgataatgattgctataatgagaaagatagtaaaaacgataactacagctataaaaactaactctaattaagcatattgcatgcaccaggtactctgttgtccagataatttgtattctttcttggcttatgatggcaaaggtagcataccttatttttaaagggaagctgagagcctgaatctctaacattcagtaggcagaaaagcttccaaacttaagttctatccgaagggctgccaactatggcccacgggtctgatccagcccgccacttgctttcataagttttactgaaagacaatcaactcattcggttacatattgtcaatgctgctttcacactacatgggcaacattgagtagtcacctcagagaccttgtggccagcaaagccaaacatatttactgtctggccttttatggaaaatgttggttccaaatctttgctattgtgaatagtgtcacaataaacatacgtgtgcatgtgtctttatagcagcacgatttataatcctttgggtatatacccagtaatgggatggctgggtcaaatggtatttctagttctagatccttgaggaatcgccacactgtcttccacaatagcaacccaaatgtccatcagtgatagactggattaagaaaaggtggcacatatacaccatggaatactatgcagccataaaaaaggatgagtcaatgtcctttgtagggacatggatgaaggtggaaatcatcattctgagcaaactatggcaaggacagaaaaccaaagaccgcatgttctcactcatacgtgggaactgaacaatgagaacacttggacacagggtggggaacatcacacaccggggcctgtcgtggggtgggggtaggggggagggatagcattaggagatatacctaatgtaaatgacgagttaacgggtgcagcacaccaacatggcacatatatacatatgtaacaaacctgcatgttgtgcaaatgtaccctagaacttaaagtataattaaaaaaaaaaaaccaccaaatttccatcttccataatagaaaaaaatcagaagggagtacctaaaattgtaaaaaaaaaaaaaaaaaaaaaaaaaaaaaaaaaaaaaaaaagaaaagaaaatgttggtcaactcctctaccgttctatctccagcattctggtaggacatagagttcaagctggaaacaaagcacctctttgactttaagaggacaaagcacctctttgactttaagagggacaacattgggaggccgaggcaggcagatcacctgaggtctggagttcaagaccagcctggccaacctggtgaaatcccgtctccactaaaaaatacaaaaattagcagggcatgatagcgggtgcctgtaatcccagctactcaggaggccaagacgggagaattgtttgaaaccgggagacggttgcagtgagctgagatcacaccaccgcactctagcctgggcaggtgagcaagactctgtcgcaaaaaaaaaaaaaaaaaagggacaacagtaactaacatacatgatgttttagtgtgtgcacaacctacttcctaacccaagcaccattaacaaaatattgacttcttcaactaactgttgtgtgttgagttttgcaagcttcattactgaagcaataaaacatggctattcagactatttccttgaaaattctgacttacttgccttgcagctctgactttggggaagtttatgaaatgcactcaggcccaggtgtcctgtgcgtaagaaaataaactgctgacgtcatagggtcatggtgagaatggcatgagctactgcatagaggaagcacgatttttgatgcaccatagggctttgatagttgtaatattggtgttattctttacagtagccattgctactaccatcataaagacacacattatgcttactgagtaaatgttccataattctggggtccaactattgctgacacagcaataatcacagctgggatcccgtagcctacagggtacatgaacctcttcttgaatctgcccgtgctggtgtagttggccaccttgaggttcctgacggtgaggaagaggtgcagcccttccaggagcatccaggtgaagcaagccaggtagaggaagtgcagcagccctgcaatgatggagcacagcacctggagggaacagaagagttaggggtgtgcagcagatgtggtctgtacctgattatatgctcagcacttagcatttcctggatgtggcctggaatttcaatttgagcatctgtaacattttgcctgggggctacacattttctgaagacttctgctagccattgaagtctgtttacatcatgcatagagcagggtagaaacccaaggaatacatgtcgtgggaacagcccccaaatgtataataaacaaaaattggtagaatctaccaatctaagacatgtgctctacactgccccctggagatcctcggtggaattgagctccaaatgtctatagtggaaacatctattggctaggtgcggtggctcatgcctgtaatccccagcattttgggaggccgaggtgggtggatcacctgaggtcaagagtttgagaccagcctggccaacatggtgaaatcttatctctactaaaattacaaaaattaggcaggtgtggtggtgcacgcctgtaatcccagctacttgggaggctgaggcaggagaatcgcttgagcctgggaggcagaggttgcagtgagctgagattgtgccattgcactccagcctgggtgaaaagagtgagacttcatctcaaaaaaaaaaaaaatttcatgtgctgatgttctaatccccagtatcacagaaggtgagtgtacttggagacagggctcttcaagaggtcattatgttaaaataagttcagatatgtgggccctaatccaatacaagttatgtacatctaaaaatagattaggccgaggagggtggatcacctgaggttgggagttcaagacctgcctgaccaacatggagaaaccccctctctactaaaaatacaaaaattagccagacgtggtggctcacgcctgtaatcccagctactctggagtctgaggcaggagaatcgctggaacccgggaggcgtaagttgcgatgagctgagattgtgccattgcactccagcctgggcaacaacagggaaactccatcttaaaaaataataataaataaataaaaatttaaaaataggagattagagtgcagacacacacaaagggatgaccaagtgagaacacagggagaagatggccatcaacaagccgaggagaggcgtctcaaaaaaagccaaccctgctgacatcttgatctcagaccatgagcctccagaattgtaagaaaattaatttccattgtttaaatcactccgtttgtggtaccttgttatggcagccagaacaaatgaatatacttttatagaagtcatgcttcatgatttctcataattctccagatgtgttcacagacacaaaattttccattcaatgtgcggaataaggcttccatttctaatcgtgataacataatgaggatgggatttaccctcccacattaaacaactaaatgctaaatgacatgtatgacattatgagttacagatattggagaataggcattgaatatttatgtttacagtgatttctaaaaggagggaaaggccggacaaggtggctcacgcttgtaatcccagcactttgggaggccaaggcatgtatcaccttaggtcaggagttcgagaccagcctggccaacatggtgaaaccccatctctactaaaaatacaaaaatcagccaagtgtggtggcatgtgcctataatcccagctactcggtaggctgaggcaggaaaatcacttgaacccgggaagtggaggttgctgttagccgagatcaagccactgcattccagcctgggtgacagaacaagactctgtctaaaaaaataaaaaaaataaaaaataaaaacaaatagaaaaagaaacctaccctatcaacacatagaccgtagacttctggcctccagacctgtgagacaataaatttatattgcttaagccgtccatatggtggctcttcattatgacagctctagaaaatggagacagagaccaagttatctagaatgtatgaggcaggctgggcgcagtggctcacatctgtaatcccagcactttcggaagccaaggcgggtggatcacctgatgtcaggagtttgagaccagcctggccaacatggtgaaaccccgtctctactaaaaatacaaaaaaaaaaaaaaaaaagaaaagtagctgggcatagaggcaggcacaataatcccacctacttgggagactaaggcaggagaatcacttgaacccgagaggtggaggttgccgtgagcggaggctgcgtcattgcactccagcctgggcaacaagaacaaaactttatctcaaaaaaaaaaaaaaaaaagaatttatgaggcaaaataccacagggtagggagctacagtggggttgggaagcggggaaggggagagattggcagagggtttgattacttatcagcaaatgcttgcaaggagactaaccaaaactaggagaaggctcctaaagaggagtaggcagaacaatcttctgagttcacacagaactggaaatagcttgttcctattgtccaaatggtttgttcctattacccaattttacctgaagttctgtgtgttaggggagtctgatatacagattccctgtatgttagagcagattttctgtaaacaggctctctgtatgttagagcagactctcctaacatccagaatttcaggtaaaattatcaggagagtattatatcattaatggggccaaatgagccctagacgaaagagaattccgtgaccactctattcaatcttagaatcaagacttgaatgtatcaaactgtttccaagtcacttaattatgtcccctcaaaagcctaaaactgtttaaataatttttttgaaaagatacagcactcataatttaaaattcaccaagaatggcattcaaacaaaaaatagcaggcatgcaacaaagcaggtaaatccaatcaggtaatatacacacatcctactatttctgtctctccagaaaccctgactaacacagcctcttaactaccaaatccagcagtctctctacttggcgtttctgtttgtttttgtgtgtttgtttgtttgtttgtttgttttgttttgttttttgttttgagacagagtcttgctctgtcactcaggctagagtgtagtggcatgatctcggctcactggaacctccacctcccaggttcaagcgattctcctgcctcagcctccagagtaactgggattacaggcacgtgccaccatgcctggctaatttttgtatttttagtagagacggagtttcaccatgttggccaggctggtctggaactcctgatccacccgccttggcctctcaaagtgctgggattacaggcatgagccactgtgcccgtccttctacttggcctttcagcagaagctgatcaacctagttggcactttctgtcctttgatgtcctggacattcatctatccaggaattctcacctgcttatctttgagtcttctcgtctatctcatgtatcttcctcctcccaatctttagattacaggcgtgagccaccacgcctggcctgaatttgcttttcctgtccctgaattaactgaagttttattcaaaattttgtgtataggtacatttgtctgggaaaaagggctttagctttcaacaaaattctcagagggatccaacttcaaagatgctgagaaccattgctctggggattttcaagagaaaatagaattcaggcttaaggaagaactggtttgaagtataattggcaattaaaatgtggactaggctggggtgacttctaagcctttgtgtccccatccagaatgtggagactgtggctcctacatcctggtggtccctacctcataggtgtttgcagagggcctggcacctgtgaagaccctccttactgagtggcctctattctgagagcatggcctcaaggactctggagagaattatggagagaccacgtgtggaactttcttcctcctgtcccaacgccccctcttcctcttcctcctcctcctccctctaccgcctccttcctcctccacagagctttattcttaatccattttacttatcactgatcgttatttctgtagcttgaagtgtctccttcgtgtagaaaactccaatatccctttctcctgcttcaatctctcctgggctcaaaattcctatttccaattttctattgtatgtctcaattccagtgtctgaccagcacctctaactaacagatttaaacccgaattcattctatgtctcgctccaagtctgttcctctttctcgccatccatctacccaacctcccaaatgggagacctctaattcatccttatttctgctttctcacacacacaccacttccacatctatttgggcctcaagtcttaccaactccccttacaaacatttctaaaatctggcccacttcctttagcagtgttcatgtttttatttttttattttgttttattttttgagatggagtctccctctgtcacccaggctggagtgcagtggcatgatctccgctcactgcaacacttgcctcccgggttcaagcaattctcctgcctcagtctcccaagtagctgggattacaggtgcccgccaccacgcctagctaattttttgtatttttagtagagacggggtttcaccatgttggccaggctggtctcgaactcctgacctagtgattcacccaccttggcctcccaaagtgctgggattacaggcgtgagccaccgtgccaggcccatatttttattaactcccacttagaccattcatagccctgttgctattctttctgctgctagtttcatctcactgcagttatctttaccttcaacttttgttgtcctgataagtattttctgtcattcccagcttgaagtcctttccactgctgccttgagcagggttaggaaatcagtggctttgggccagttctggcccagtatctgtttttataagtaaagttttattagcacatggccacacacattcatttacttttatctgtggctgcttttttttttttcttttgagacaaagtctcgctctgttgcccaggctggagtgcagtggcgcaatctcggctcattgcaagctccgcctcccaggttcaagtgatcctcctgcctcagcctcccgagtagctgggatcacaggtgcccaccaaaggtctggctaattttttgtatttttagtagaggcagggtttcaccatgttagccaggctggtctcaaactcctgacctcaggtgatccacccacctcggcctcccaaagtgctcggattaggcgtgagcaaccgcacctggcctcagcacatgtttctaagctgtgaactctatggggaaagtaactgaggtagttcccctagtcccctaattattaatgtatttgcaacacaatgcctgacacacagtgggtatttttaaaatatccatcaaatgaataaataaataaaataagaggtaggattttagagcattatataaaagcatatattttcaagatgactaagtcaactccatcttacccacaatattatttttacagtttttaaaaacatcatttgaaaattttatcagagaagtaattagtaccttccgagcacttaactatgggtgaacactgatcaaattgctttgttaagtattaactcatattattgtctcaatactctgagacaaaaaaattttaagggccaaattttaagctatgcagtcaaatctctattgcaattacaccattctgccattgtagcgtaaaagcagccacaaacaatatataaatgaatagatgaggctgtgttttaataaaactttatttacaaaaacagaaggtgggccagatttggcctgaggactgtgtcttcccaacctctgcctattttcaaatgaaacaccaagaggttaaaatctggcccccaaatctcacagcgagtaaaaaataaaattggatttgaacctaaactatctccagaaaatgtacttactcttaaccataaaactatactatttctcaggaaaaaaaatttaaatataaacagagtgcttttgtaactttctagctgtgtgatcatagtgttttagggttaacaggagacttagagaaccatctagctttaaatcttcctggataatatgatggccaggatcatgataaagataaaagtgaacattgttctctgagtgattaattcataatcttttatgttttgtcttgctaagttcttactaaatcctatgattaggcccctgttttgcagaggaagtttaaaaaggggaagccacaagagatctattgtaaaacatggtgatcatagttgcatggtaacaatgtatgtattcttaaaaacttttaaaagaatacgttagtgttctcatcacaaacacacacacacacacacaataaagctgagtatgtgaggtgatgcaaatgttaattagatcaactgagccattctatgacgtataatatttcaaaacatgctgtacagaaaaaaaatatacatatactttatatttttcagtttaaaaattaaatttaaataaattaaaaggggaagtcacttcaacaggtcttacagcaagtagggtgaagagctgcgattcaagcgcagatcagtgcagcaaacccactgcccaccaaaaatgcaagcctcttccccaccctcaaatccagagtatagatttgtcactaggaagtggcttcccagacagagaccacatttcccaactgcccttgcagttatgtgttatcatgtgaccgagtcctagccaatagagtgtgaggggaagtgatatgcaccacttcatgatgtggcacatgttaacctcccccatgggaactcagccatgttcttttccccctccgggttggctgatatgtgaacaccacgatgaccttgggagctgtgtatggaaaatgacagagcctccctcaacctgagggtgcaggatagacactcttcagacctgtttgctcaccctctactgatacataaggaaaaaataactcctactgtggcaagcctgtgacattctggagttgatcctaacaaccgctaatgttaccctatttaataccatcagcctgacactccatcactttgctaaatggcccctcagaatgtaaaggtcttattccaacttctataggaggacaactgaaatggagctcatacttttcctctctacatcatcactgctgactaatgccttgctctccatcttcttgtgggacaagatggctggattcgttatggcaatgaggtaatttgggtaaattacctacctcaggctcagttctgttgatgcccgtcaggaacaggaggtgggccaggaagaggcagagggagagctctagatggagggaggtgctggtgttctggatgggccggcacaggaggaaggtgaggatggccaggaagaggcacagcagagagatggtcagccccacctgggtgatcacggtcagcacagggtcctcctgcaaaacaccaaagggggaatccattatggtgtccgatggtgttgttattttcctgaggtagtgccagatgggcttcctagttcagtccctgaaacaattgacttacctttctgagacttagtgttctcatcttcaaaatgagggcagtagtaacactcatcacacaggaatgttaaaaaccaaaacaactagaccagtgctggatacagctcttaacaaatgactaatgggagttagtgtataaatactccagctcccttgctgctcagatagaatgacccagagatgtgagttctacactgactcccagagtcccccagagggaataaattccagttacctatggtggtaactggcttgataatgctgtctgcactgacacctgtcttacttccatctcattgtctcagtcccccactagtgtttcctgtaatcccctttcaagtaagctactaccatttgactccttgtcttagaatcttttttctttttcttttcttttttttttttacatggagtcttcctctgtcaccgaggctggagtacagtggcatgacctcgactcactgcaacctccacttcctgggttcacccaattctcctccctcagcctcctgagtagctgggattacaggtgtgcactaccatgcccagctaattttgtatttttagtagagacggggtttcatcatggtagccaggctggtcttgaactcctgacctcaagtgatccacctgcctcggccccccaaagtgctgagatgacaggcgtgagacaccgcgcccgacctttagaatctttttgtaagaaatgcagaggataactcacaaattctcggacatacacaggttcacaggaatgaatcttggtaccttgggggcaagagccacgaggacggcaaagctggacagatggaagcacttgcatttggtgtaagaaccgttgctgtgcacatgagagcagccctccgtggaccagcggcctccctctgatccctcccagtagacacagatatgttttgttctcttgtcaccaggctggaaagagaatagtatgaaagtgggtctcttcctggttttattttttattttattttattttattttgagatggagtcttgctctgtcacccaggctggagtgcagtggtgtgatctcagctcactgcaacctccgcctcccaagttcaagtgattctcctgcttcagcttcccaagtagctgggactacaggtgaacactaccatgcctggctaatttttgtatttttagtagaggtggggttttgccatgttggccaggctggtcttgaacccctggcctcaagtgatccgcctgcctcggcctcccagagtgctgggattacaggcatgagccaacatgcctggcatattatttcaactttacaggttaatcacaatgcacagtgttggaaactggatcggaaatacacttgtaggggaagagtttcacatcaccacgcctgcggtgggtttattctccatctattctgcccttctctggtcagctcagcaccctggggttgaccctctgaatggcttcgccagcttccttgctatttatagaagcaaagagaggcattggtgagactcactgggtgagagaagagagagaaataaagtatttcttccctgtgccctttctgctttgagccatctccagtttctgcagagcgatccctcattcctgcctccagcttccactgagctcaatagagcttctcctccattgccttttggcttcaacgtgagaatggcatctcactgtggcaagctctggatgcctcaacacttcctttcttcctgagctttactaaagtgtgattaacaaagaagaatttgtatttatacgttttgatagatgtatacatttttaaatgattactacaatgaagctaacacatccaacacctcacatatttttgtgtgtgtgtgtgtgtgcgtggtgaatacacttgcaatgcactctctcagcagatctcaagtgtacaatacattattaagtgtagttacattgagtgttgtacattaggctgggcatggtggctcatgcctgtaatcccagcactttgggtggctgaggcaggcagatcgcctgaggtcaggagtttgagaccagcctggtcaacatggtgaaaccttgtctctactaaaaatacaaaaattagccaggcatgatggcaggtgtctgtaatcccagctactcgggaggctgaggtgggagaatcatttgaactcaggaagcagaggttgcagtgagccgagattgcaccattgcacttcagcctgggtgacagagtgagaccctgtcccttaagaaaaaaaaaaaacaaaaactattggccaggcatggtgtcttacacctgtaatcccagcactttgggaggctggggtggacggattacctgaggtcaagagttcgtgaccagcctggccaacatggtgaaaccccgtctctactgaaaataccaaaaattagctgggtgtagtggcacactcctataatcccagctactcgggaggctgaggcaggagaattgcttcagctggggagatggaggttgcaatgagccgagatgacgccactgcaccccagcctggccgacagagcgagactctgtctcaaaaaaaaaaaaaaaatcttcattcatctgttgacagatacttaggctgtttccatatctcagctagtgtgaataatactgcaataaacacgagagtgcagttatctctttgagatcctgatttcaattcttttggccacataccccaaagtggaatcgctggaacagacgataattctgtttataactttttgagaggcctctgtactgttttccataatggctgtaccacattacattttcatcagcagatctataagggttcctcttttttttttttttttttttttgccacatactgatattttaagtttttggtaatagccatcctcactgtggtgaagcaaaatctcattgaagatgcctcagcgtgtcttgtgtgttctcttacttctgaattccgtttcctacttgggaagctgactgcacctgctcaccctttaaggtactgcatggagacccagccctgggtgtttctcacctgattatggcgaaaagtcaggaacacaggttcagagagggaaattttttccttcaaaccgacggtgccgctcacaacgtaagagttcagttttacttcctgcatcccttttcgtttactaaaaaaggatgcattcagaatatccccaagagattgataagtgatagggcaactgcagtgctctctgaagaaaaaaatggaaaagaaatactgttagtggccatccatagtttggagagaaagtacagtactctctaatgtgagggtcgtagggcaggcaatgaatggctaaaactgcccttggaaatcccttaaatgctgttcaatacaccgtgtgtcgcttggggtgcagcatttttgtctacgtaatatgtattataatgccccatacattataagcggtgcaaaatatgtgcaaaatatgtgcaaattatgctcttcagagtcctaaaaatatatatgagcccttgagcattacaaccagagttgtgaggcaagatgcttgtcctcagaagggcacatggaactcacgcaggctaagaaaaccacactctctcagccttcacctcaagctcactccggggtacctaatttagtggaaaggtatgcagaatgacccactgtatttaattaattcactcattttttctctttctcatcttattacccttcctctccctgtcttccttttccccctccccttttcatgaagccaccgtttaatgtatagaggttcaggccgggcgcggtagctcacacctataatcccagcactttgggaggctgaggcaggtgggtcatctgaggtcaggatttcgagaccagcccgcccaacatggcaaaatcccatctctactaaaaatacaaaaattagccaggcgtggtggcgggtgcttgtaatcccagttactcgggaggctgaggcaggagaatcgccggaacccaggaggcggaggttgcagtgagccgagatggtgaatggagaatccgactccaaaaaaaaagaaaaaaaatcatggaggttcagtgcacacaggacacccgtatgatgggagtgtttcccaaattgcagttatccacgtgctaccatcccatttttgaccaaagctacttatcatctgtatttctatttgctccatttaaaaaatccaacgcggttgggcgtggtggctcacgcctgtaatcccagcactttgggaggccgacgcgggcagatcatctgaggtcaagagttcgagaccactttggccaacacggtgaaaccccgtctctactataaatacaaacattagcagggcttggtggcatgtgcttataatcccagctacttgggaggctgaggcaggagaattgcttgaactcgggaggcagaggctacagtgagccgagattgtgccactgcactccagcctgggcaacagagtgagagtcagtctcaacaacaacaacaaaatcaactcatttttagatccctttcctccctttccctactctaccgctcacagtaaggagtgaagattaatgaataaccaggaattttttggaggaaatgcagcagatatttcatttttaaggtaaccaggtttttctctttgaaatagtttatatgcattcattcatttatgtttcatggaaatatttatgtatcctctactgtgtgccagacattctaggaattattatacagcagtgagcaaaacagacaaaacccctgccatcagagagctgacgatgtcgtagtgagagagatgggccaccaacaaataaataaattagaaaaaatacatagtgcaggagctttgcagagacttcaggtgatgagataaagtgtgggtgaaacactatgccgtgaaggtaaaacccagcctgccacctgcttttgtaaataaagttttatagacacacagcctcactccttcactgacacatcatcaatggctgctttcacactctgatggcagagctgagtagttatgacaaaggtcatctggaacaaaaggcctaacatatttactctctggaccttgtagagaacatttgttttccaatctgtggtaaagaacaagactcggcagctcttttaaaaagggtgtacataaacgcttctcaaggaagtgttcaaggcaatctgacaccattgagtgttaccttttcagaccattacatggaaacagagcatgcatcagccagtcccttttttttttttttttttttgagacagaatctcactcttgtcacccaagctggagtgcaatggtgcgatcttggctcattgcaacctccgccttctgggttcaagcaattctccggcttcatcctcccgaatagctgggattacagtcacgcaccaccatgcctggctaatttttgtgtttttagtagagatggggtttctccatgttggccaggctggtctcaaactcctgaccttgtgatccacccgcctcaccctcccaaagtgctgggattacaggcgtgagccactgtgcccgcccagccagtcccttttaaggaggcatttcaaggaatccttatgcaaacctttgtgtatgtcacaaaatacacaccccatgtgacagcccgacttctctctgcaaaatgcctagttagtggttacggaagatcattttattccaccatgtagaatctccctaccttaaaagctttgtgaattctcaccccagggtttaatcgcctagaaataaaacaatgatgtgtagaatttggagtcaagataattcatcggagatatggtacctcttaggtttccttttaaagcatcagcacagttgatatccatggtgttatttccagcttccagaaaagcattctcccttgtctcattgcacctcttggtttcatagactgaaaacattaagaaagtcagtcctgttctcaagtctcatacctaaataatttgctaaagaactcccttttctggaagacctcctactggtgattccatctctcctatgcaaggttggccacgtggcaccttgttcccatctttggctggtagaaatggagtggccaaaatggccttagcaacacactggccacagcccaagagaggagaagggcatgcttcccagaactggtactctgataggcaagctaagcagtttccacaggacacttaatggtaccggagtccctggttaggggagaatgcaatctttataagcaagagtagctaagcatttaaatgttttccaaaaaaaaaatagtcactaggaacagaacttctgcatttgggaagaatccctgtaaacctataaacacaagagctgatcattttgtgaggtcaacctcaacattttggggtatacagagtttgtctcagaacaaatgagaaaactgtcctaggtgctatggcagactgcttattacctgtgatcaccatttacctattctttctttgcatctagaactactaaatttaagctgaagacaagccattttccagcttcccttgcagctaggcagagccatgcaactattttcaggccaacggatcaaagaacagaatggcatgtgctaagggaaacaggcatcctttcaacttctcttctccccttttcattggctggtaaaagggtgtgatagtacaacaactctcttgtatcacaaagtgaaggtgaatgttgaagacagcagagcacagagctggcatggtattgctacatcagccctgactcacttatgctcaaactattcaagaaataatggttaagctgctgtttaccacggttataccaccagatttggtatgttaattcagacactaagttcacatggaacatttgctaaaatagaccatcagtcaagtctcaacaaattcaaaaggattgaaatcctacatagtgtgtgctcagacaactcatcaaaaagagtatatatcacaactattttttcctggtaagtaagcctggtttaacatatgtaaatcaatcaatagggttcatctcattaacagaatgaaagataaaaatcatctcaattgatgataaaatgatcatctcaattgaggtaggaaaaagcatttgacaaagttcaatatcctttcttgattaaaacccacaataaattaaatgaggccattaacacaaggaaaccttaaaaagccacaaatatttggtaattcagcaacacacttctaaataaaccatgagttaaatgatagattacacaggaaatgttttaatattttgatctaaatgataatgaaagcccagtatatgaaaacttgcaggatgcagctaaagcagtgcttagagggaaatatatagctctaatttatagctaagttttaagttttaaatgcatatattgggaaaggagaatggtttaaaattagtaatctaaataaccaagacaacaagttagaaaatgaaaagcaaggccaggcgcggcgtgatggctcacgcctgtaatcccagcactttgggaggccgaggcgggtggatcatgaggtcaggagattgagaccatcctggctaacatggtgaaaccctgtctctactaaaaatacaaaaaattagccgggcgtggtggtgggcgcctgtagtcccagctattcgggaggctgaggcaggagaatggcgtaaacccgagaggcagagcttgcagtgagccgagatcgcgccactgcactccagcctgggcgacagagcgagactccatctcaaaaaaaaaaaaaaaaaaaaagaaagaaaatgaaaagcaagttccacccaaagaaagtaaaaggaaagaaataataaagaacaaaaatcaaagagaaaggaaatggaataataatataaataatcaacaaagccaaaaattggttctttgaaatgattaacagatacagaggtcagaaagaaaccagagttcctgacatagagttcctaaaacccttagagtttcctgagcaatagaatcactaggaaaatcttttgttctgatatttggtcttggactcaagttgctgacatatagtccctaagaccgttgtaatttcctgagtgacaggagtgtgtgactcaactctgaaatcctttgtactttcttggttatagaaatatcttttattctaatgtagtgactcttagccagctcctggatagcctcaggatgggggtggttgccaaggaaaccaatggtgagattaaagggttggaactttcagtttcacccccatcccagatacaggaagaggaggggggctaaatgttgagttggtatcaatggccaataatgtacccaatcgtgcctaactaacgaaccctccatacaaatccaaaagatttgttaagctgtctaggagattctagattgctgaacatgtgtgggtccccggggtggcacctctaaagagggcttggaagctctgcacctcttctcccataccttgccctgtgcatgtcttccatctggctgttcatctgtatcatttgtttatatatatatatgtgtgtgtgtgtgtgtgtgtgtgtgtgtgtgtgtgtgtatatgtgtgtgtatatatatgtatataaatgtgtgtatataaatgtgtgtatatatatacacacacatacacacatataatatatataaatatatatttatgttttatatttttattttaatatatatattttttgagatggagtctcactctgttgctcaggcttgagtgcagtggtgcaatctcagctcattgcaacctctgcctcctgggttcaagcgattctcctgcctcagccccctggggagctgggattacagatgcgtgccaccatgtccagctaatttttgtattttttttttttagtagagatggggttttgccatgttggccaggctggtcttgaactcctgacctcaggtgatccacttgcttcggcctcccaaagtggcatgacccaccacacccagcccatttgtaatatatttttaataaatggataaatgtaagtaaagtgctttcctgagttaagcgagtcactctagcaaattactcaaacccaaggaaggggtcatgggactctaatttactgcctgtcagttggacgtacgggttacaacctagaacttgggattggcatttgaggtgaagaatacttttgtgggactaagcttgcagcctgtgggatctgacgctctctttggttgataatgtcagataatgtcataattgaattgtagaacacccagctggggtccactggagaactgtgtggtcagtgtggaaaaggagcccacaataatttggtgaccagagatgaagtattccgtgttcttgttactatgtgagagtagagtaggaaaataaccgaggttttttctatcccctagccatggtggcatagcgaatatgctcttaaatactttccatcataccaagggaagttgaaaagaagaagagagctggtttattctcttgtcccttgaatttgcatttttgaaaatggagtccttctcatgtagaatgttggtgtagagggtctgtgatcctgagagcccacagatttcatcattcagaaaccctgacaaagccaggacccagacgtctttatggtctttatggagggtcataaagactctactcagcctctcttacctatatcaaattcagaaatttgaccctttcctggagaagcaaaactcgcattccagatgctcaactccacgctttgaattagttgagtagcccttcttgcaaagtcctctctgcttccatttcttctcagattttccttccaaaaaaattaagctaattagattgactcttactgaaatgtaagaaatagggaatatgcacaagtgttggagtggggagcccagaaggcaacgatatttattaaggtgctacaaggtgcgtgtggcattgagaatctaggtgcttgatgtaggtctttgaatgccagctgaggcactttccccctacgcttgtatttctctatctctatggacatgtggcactaggcacttcttgattgtgggaggctgtcctgggcactgtaggatgttgagctgtatccctggtctccatccaccagatgccagtcacacacatcacccccaaggtatgacaaccaaaagtgtccccagacattgacagatgaccttgggacagaggacaaaattacccctggatagaactaccctaccctaaaaatcacaggaagacatgttaatgtttgggtaggaaaatggcatagttatacgtaccagctgtttcccaaatccaggcttcaccccactcacccaaatatccacgtttgactgtgtcgtcccttgactattgttctctgtgaaagaaaagatgtcattgaaagagatatgggagaaaatacaccctgcttacatcccttcttctagtcaccctcaagttgagtctttccctaataattctgcagcccatcctaattcccctctaagaagcctaaaaggtattgcacagtagaattataaaagagaattagaatgggtcttccagtttcatattgagttggtgcaaaagtaatggtcatctttgccattgaaagaaatggcaaaaaccgccattacttttgcaccaacctattgctttagtcaacactgtttattcggcacctactcaataccaggcacaacgctgaactatatggatataggctaggaaaagaaaccaaggtatccccttgtggaatctgaagtctggcaggaaagtcattaagcaagttattatcaataaataattaagcaattgcaagggacgctcttaataaatagaacatgacatgtggacaaaaagatgggaactatagacagtggggactactagagggagagggtgggaggctgatgagggctgaaaagctacatatcaggtactatgcccactacccgggtgatgggaacattcttacaccaaaccccagagacacgcaatttacccacgcaacaaacctgcacatgtaccacccccaaacctaaaataaaataaaacaggacttcccaaaatcaatcaatcaataataaataggacacaatggtgtgggagtatatagcagagggtcccaacacatcagggtgacatggaagaaatcagtgttaattgagttaatattatagaagcagttgcctacacatcacagtatataacgtgccttcatatatattatctcatttcaaggaacactgaaggttgtagaaaaggcatatacagcataatatccagtattaactgacccttcctaggtgcctaggactgttaaatatttcacatacattaataatgagtaggggccgggtgcagtggctcacgcctgtaatcctagtactttgggaggccgaggcgggcggatcatttgaggtcagcagttcaaggccagtgtgggcaacatggtgaaaccctgtctctaccaaaaatgcaaaaattagccaggtgtggtggcacatgcctgtggtcccagctactcaaggctgaggtgggaggatcgcttgagcctgggaggcagaggttgcagtcagccaagatcacactactgcactccagcccgggtaacagagtgagaccgcatctcaaaaataataataatgaataggtaaggtgtattaatttgctagggtttccataatatagtgacacaaattgggtggcttaaagcaatagaaatatattgtctcatagttctggagggcagaagtccaaatcaagatgccagcaagaccatgctccctctgaaggctccagggaaacaccttgccctgcctcttccagcctctggtggttgccatcaatctctgacattccttgccctttggcagcataattccaatcttcacctctgtcttcacatggccatcttccctgtgtgtgtgtctctgtgtccaaatatccttcatcttataaggacaccagtcatgtaggattcagggtccactctgatctaatatgaccacatcttgacttattacatctacaaataccctatttccagataagatcacattcacagattccaggtggaatcagtttggggagaacactattcagcccagtaagaaggaatcagaaatggctccaaataatccctgcctcttggaattcacatccttgggtaatcttcccttgactgtggactggactaagtgactcatttctaaggaacagaatatggcaaacatgataggatgtcacttctgagagtgggttataaaagactatgactcctgtcttattcatgctctctttctggctattctaatgtgtttgctataacaaagcaagctgtagagacccacatatctaggaactaaaggctgcctcccaccagccaccagaaatgaactgagggtttcagtccaatagctctgaaggaactaaattctcccagcaaccttgtgagtagcttggaagcagaacctgccccagtcgagtctccagatgaaaccacagcctggataaaacctcaattgcaactgtgatagacccagaagcaaaagactcagctaagccatgcttagttccttaacccaaagaaactatgaaacaatacatatgtgttgttttaggccactaaatttggggataacttgttatgcagcaacacagaactgacacagtagatactattaatattactactcccatttaaagatgaggtatatagaaattaagtcattaactgaaaaccagatggtaagtggaagatttagcacttaaatcccatctctcttacccaaaaagtgaaataatactggaattaaacaaataaataaattgtggatagtgagagacaggtttctcattgttggagaaggaagctacaaataaggaaagagggaagtttccgacaagccttgatgttgaactggaaccagaggtatcagtgtgaattcgtcagatttagtagataggtagatagacataaaaattgaatttaaggtgagtgagagatgaataaatagagaaattcagaagaaatttagagctgcccttttggaagctcaggaaacagacctgtattggacacatacatttggaagcatctatatagagatagttattgatgccaaggcttggatgacaccatcttggaaaatatcatcaaagacaacaaaggaatgagggacgagggttaggatggagctttgcactcttaccctggcctgaaattagagaatctctcagagtctcccccaagtccccaccatttttcatagtggaaataggatttggaggttcttaccgtaacaatccggatgatcataatctataataccagccagaaagttgaataaagtatattttaccaaacagctacagatgtaacctccaactttattcctacaatatgctttatacttgcactttgccagcccggtttcacattcattaatatctgtgaatcaagagaaagtgttgctttcattttcatagaattataccatttcccttgcccatgaaatttttattgcccaaccattgtccatcaatgttctccctaagttaatttataaatccaatgcaattccaattttaaaaacatctacatgtattttacggggtgagagacaagttgttactatcatgcaggtgtagccagaaaaaactacaaggtgggaaccagacattaaaacaaagtataaagctgcaactaaacaaagaggtactgatgcatgcataaataaaaatagactaatggaatagactagaagtccagacacagatgcaagtacctatggagctttagaacatggtaaaggtggcatgtcaaatcactagaataaggatggaatgttgctgtttttaatgttgtttttaagtcacgccatttgctaaatcaatttaacacacatagtgcatagcaggggaataaatatacggtaagttaacacactattagaaaagcttgagagagatgaggaaggaccacactactaaaatcctggctcagccgggcacggtggctcacgcctgtaatcccagcattttgggaggctgaggcgggtggatcacctgaggtcaggagttcgagaccagcctggccaacatggtgaaaccctgtctctactaaaaatacaaaactttgctgggtgtggtggcacgtgcctgtaatcccagctactcaggaggctgaagcaggagaatcgcttgaacccaggaggcggaggttgcagtgagctgagatcgcgccattgcactccagcctgggcaacagagtgaggctctgactaaaaaaaaaaaaaaaaaaaaaaaaaggcggggcacggtggctcacacctgtaatcccagcattttgggaggccgaggcgggcggatctcgagtccaggagattgagaccatcctggcgaacatggtgaaaccccgtctctactaaaaacacaaaaaattagcaaggcatggtggcaggcgcctgtagtcccagctactcaggaggctgagatagcaaaatggcgtgaactcaggaggcggagcttgcagtgagcagagatcgcgccactgcactccagcctgggcaacagtgacttatgcaatgtttatgtgtcttgcctctcccaaccacatcagccttccgtgctgaatggaccagagctgaggttcaagcaagggacccacaggcagaaggtgctctggaccacagacttatacttgtgctctccatctgaaggactcagggacaagcacacctggccaatggctgtactttgtcaaatagtctgctgaagaggtacgggttttatttgggctatgggtttatgtgttttgggcagaggacacatggaacagaatagttatcactaatgagagattaaattaaaaccccgttaatatttttaccttcacacttctcagaggaatcatgaaagtatgtcctgccagacctggcccgaaagccatcttcacaagtacagtgggtgctgttgtggcagctggcatatttagggcatggaggacaggaagctgcagagaaacagaaatattcagtatgcatctaccacgtaccgatgctgcggtcagaagaatgtcatcttaggaatgcctctgttggcatccttttggcacccagcccattgctgaacacagtggcacacagtgcccagccgtgtcccacttctgccaccaacaccacttttgccagataggtgaacctccaaatgccggcacctgtgtttctttccttgcaggctaaccctggctaccagaattctctttgttcatcacatggcaggttaacaatgcctttcctaagtagctccctttatcaatgattgatagaagatagtgcattaaaaaaaagccaatttcattattatttaaaaaaaaaaaacagaaaataacaagtgttggtgagaatgtagagaaaatggaaccctggtgcactgctggtagaaatgtaaaatgatgcactgtctatgagacacagtatggcaattcctcaaaaaattctaaatcagaattaccatatgatcttaccatatgatccagcaatcacacttctgggaatatatgcaaaggaatcaaaagcagtgtatagaagagatatttgtccactcatgttcatatcagcattattcataatagccaaatgttgtatgtaacccaggtgcccacgaatgaataaatgaatgaacaaaatgtggtccatccacacagtagtacgttattcagcctttagaaagaaggaaattctggccgggcatgttggctcacatgcctgtaatcccagcactctgggaggccaaggtgggtggatcacctgaggtcaggagttcgagaccagcctgaccaacatggtgaaacctcgtctctactaaatgcaaaataaataaataaataaattagcctggcatggtggtgcatgcctataatcccagctacttggaaggctgaggcaggagaaacgcttgaacccgggaggtggaggttgcagtgagccaagattgcaccattgcactccagcctgggcaacaagagtgaaactcagtctcaaaaaaaaaaaaaaaggaatgaaattctttttttttttttttttttttttttttgagacggagtctcgctctgtcgcccaggccggactgtggactgcagtggcgcaatctcggctcactgcaagctccgcttcctgggttcacgccattctcctgcctcagcctcccgagtagctgggactacaggcgcccgccaccgcgcccggctaattttttgtatttttagtagagacagggtttcaccttgttagccaggatggtctcgatctcctgacctcatgatccacccgcctcggcctcccaaagtgctgggattacaggcgtgagccaccgcgcccggccaaaaggaatgaaattctgacacatgctacaccataaacgaaccttgaggacattatgctccatgaaataagccaggacaaagcgtcaaataatgtatgattccactcctatgagatccaatcccagagttgctggattcatagagacagaaagtagaatggcgggtgccagggccttggggaggaggaatggggagttcgtgtttcatagagacagagtttcagttctgcaactagaaagaacactgtgggtggatggtggtgatggttgcataacagtgcaaatgttgaatggcattgacctgtacccttgacaatggttaaaaagctacattttacgttgtgtacattttaccacaatttagaacatagtcataatcaatagcttccttacccattgaggggtacaaatctgaggtgcctgctccatgccatacccaacagctgcctccagggattaaactccagctgcccgcatctaacttgcttgataaagatcctatatgagctcctccccttcctatgccactgcccactcccagctggtgcctcctaggattccctcccagaacaacgagttgctctcagggtcggcttctgggggaacccaagcaatgacttgtggtgaaggcaaagtatttcctggaatgactcaagacacaggtttggggaaagaaagaggacagtctagcatccaccagccatgtgaccttgagccagccacttctctggaggacccttgatcaagtgggtataatgcccatgctgagtttgtaggattgttgtggggattaactgagatggcacgtgtgatgtgctttgctatgtaaatgcagatgatggtgatgatggagatgggaaaacagctcttgggacctccaaagagtcagaagaaagtgccagagactccatgctctgtctcttgaaaaagctccttccctcctccaaaggaagcttccagatcccaatttcctttcccctggcctttggctatgaatagactcacctccagaattcttggcttctgatcctggcagagccagtaagacagtgagacctggaacagagagaggaggggatcattcagacggggatcccctggactctgcgtggctgaagactaggtgagttaggggcaactaaccctaactctttgcccagtcacacgtgcaagcttcaccatagcatcttccaggcaggttacaaacacaagagtcacagatttggacatcacatccttctgaagtatgagaagtgcatctgattgcagctgtgtttcccaatttcagaaaactcagcagcaaattcagcttcttctctacatcctagcaccaaaagaccaagttggcaatctcctttccatattcaacagtttattttaatatcagtccagacctcgaaccacacactgtccgagaaaaatataatggaaaccccataggtccttttaaattttccattaccgacaattttttgtcttttgagacagagttttgctctgtcgcccaggctgcagtgcagtggcacgatctcagctcactgtaacctccgcctcctgggttcaagcaattctcccacctcagcctcccaagtagctgggattacaggcacccaccaccatgaccggctaatttttgtatttttagtagagatggggtttcaccatgttggccaggctggtctccaactcccgaccttgtgatccgcccacctcggcctcccaaagtgctgggattacagctgtgagccaccacgcctggctgacatggacatttttatgacctaaaacactcaacaccaattttcctgtgaataattttttttcagagagaaatatcacttgattcccatagggtaggggacagcaaactggacttatgagttgaggtgacttttatattttttacataaaacattttaaatggttggaaaaaaacaaaagaagaagaatacttaatggccatgaaaaccatgtgaattttagctgcctatgtctgtaaataaagttttactgacacgcagccacatccattcatttacatgaggtctatggatgctttagggctggaatagctgagttgagtagttaagacagagaccatacgggccacaaagctgaaattcaaattacctgtccctttacagaaaaaaatatgcttgccccttacatagagtatggaacatcacttacctgtaaggtctcttaacaaaccttccatccttaaactgcatctgatgcctcctatggagatttctttttctcatctctaagaccctaaagcccagaggacagggtgggaaggtctaggttgtaacttactgagctatgacgctccaagtgcggacccatttggtgtcaatccatgtagcagatactcgaagtgaccctttagcctaccccagagagggttcctataaatgcagatgactttctttttcgttctttctttctttctttctttttttttttttttttgagacagagtctcactctgtcatccagggctggagtgcagtggcggaatcttggctcactgcaacctctgccttccaggttcaagtgattctcctgcctcagcctccagagtagctaggattatgggcgtctgccaccacgcccggctaactttttttttatttttagtagagacgaggtttcaccatgttggccaggctggtttcaaactcctgaccttaagtgatccacccgtcttggcctcctaaagtgctcttcactctttcttgcgtggcctccccacaccctcctttcctgggatcccctcccaaaaaaactatttacacacatgagtccttgttttcgttctgctttggggcagcccagcctaactgactcaagaggagagtttctactaggacaggcacacgcagttattgctggagaaaatgccaaatttgaggaagcaaatcaagcgaggacaccaggggcatgaggagaaggaaagggagttctttgctccacttacctgagagcaggaccaggaggaacctgctccccatagcactgagacgccgggaacaatctctctgaagcaggacgtggtcagaatgcctggaacaaataaacctcatgaaatccaatttctgatggtcccaagttcagaagccccgtggccagtgcttatcaaaatgtaaggctgaggcaggagaattgcttgaaaccaggaggcagaggtagcagtgagccgagatcgcatcaccgcactccagcccgggcgacagagcaagactccatctcgaaaccaacaaaccaacaaaccaaccaacaaacaaaaaaaaccctttaatctctccctctcgtttgacccaataattctgcctctgggtaactctctcaaggaaaacaccctgcgaggatgatcttagcgtatttggttatagggaacaagtttatcacccaacaaatgctaaaaaaaacggatgcatctgaggaaatataaggctggaatttaaaatcctgttctatcgcagtcggcaagatcaagactgcaaaactccacaggacaaactactcactttttatttatttattattattttttttttacattgctgtcattgatttgtttatatttaatttttaaattcataaataattatatatgcttatgggctataatatgttttgacattgtggaatgattttttttttttttttgagattgagtctggctctgtcgcccaggctggagggcagtggcgcgatctcggctcactgcaagctccgcctcccgggttcacaccattctcctgcctcagcctcccgagtagctgggactacaggcgcccgccaccacgcccggctaattttttgtatttttagtagagacagggtttcaccatgttagccaggatggtctcgatctcctgaccttgtgatccacccgcctcggcctcccaaagtgctgggattacaggcgtgagccaccgcccccggctgacattgtggaatgattatatcaagacaattaacgtatgtatcacctcacatacctatcatttttcggtatgagaacttttaaaatctactctttcagccattttgaaatacacaatataggccgggaacagtggctcacacctttaatcccagcactttgggagaacgaggtgggcggatcacctgaggtcaggagttaaagaccagcctggtcaacatggtgaaaataatataatatataatatattattaatatataatatattattaatatataataaaattaatatattaatataatatgttaatgtaatacatcaatatattaatatactaaatcaatataatacattgatatattaatataatacattaatatattgatatattaatataatacattaatatattgatatattaatataatacattaatacattgatatattaatataatacattaatacattaatatattaatataatacattaatacattaatatattaataaatattaaatatatatttaatatatatttatataaaaggttactatctgttttaggaaaatgttagcattctatatacaattatccatatatgcatgtatgtgtatttatatgtgtatatacaaaatcatacatacaaatgtacaaacatataaatgcatcaaatgcatgtatatatgtatgataattttgtatttgcataaaatattcctggaaggtacctaagaaactcatagcatcggttgcttttgaaaacaaatgtatgcgaggcttaatacctaggtgatggattgataggtgcagcaaaccaccatggcacatgtttacctatgtaacaaactcgcacgtcctgcacatatatcttggaacttaaaataaagtaaaatttatttatttatttatttatttattttgagacggagtctcactctgtcgcccagactggagtgcaatggccctatctcggctcactgcaacctccgcctcccgggttcaagcggttctcctacctcagcctccccagcagctgggataacaggcacctgccaccacgcctggctaattttttgtgtttttagtagagacagggtttcgccatgttggccaggctggccctcctcagcctcccaatcccaaaatgctgggattacaggcgtgagccactgcgctcagccgaaaataaaacaagatattttaaaaagagagaaagaaagcaagtggctgggaagccgaggcaaggagacttttcagtttaccctcttctatcttttgaatcttgagccaagtgaagatcttttctgttcaaaacataaatcatttctaacagagaaaatagtggaagtactagacattactataaatgagcctttcttaccgtgtcgcccaggctggagtgcaatagcgttatctcttctcactgcaaactccgcctcctgggttcaagcaattctcctgtctcagcctctcgagtagctgggattacaggctcccgccactacgcctggctaatttttgtattttttaagtagagacagggtttcaccgtgttggtcaggctggtcttgaactcctgacctcaggtgatccacccacctgggcctccgaaagtgctgggattataggcgtgagccaccaagccaggcctaaatgagtctttcaaagaagactttaaggatcattttagtaagcgttggcctatggatatcaatttaaaatgcagaaagcactctcctaaggtaatgtcggtggccaattggggtttaagataaaacctccagtgcacattagcaaagatattgtgctctgcagatctgtgaagcctttcaaaggcgctgccaatgatgagggaggcactgatggagaagatgctttaagtagtttgcagaaaagtttcacaaaatgtaagcaggaaggaaaacaacaattacgtgtaatgcaaacaatctgatatcacatgcaaaaataatgttgtaggaggctattagaacaacatagggccgggcacggtgggtcacacctataatcccagcactttggagggcagaggcgggcagatcacttgaggtcaggagtttgagaccagcctgaccaacatggtgaaacaccgtctctattaaaaacacaaaattatccgggcaatgtggtgagtgcctgtaatcccagctacttgggaggctgagacatgagaatcacttgaacctaagaggtggaggctgcagtgagctgagatcaaaccactgcattccagcctgggtgacagagcgagactctgtctcaaaataaataaataaataaacaaccatagaaagtgattatgacgtagcattaggagcaaaaggaggttatattattctgtcattacacattgtatgcatgtatcaaaatatatcatatgtaactcataaatatgtgccactattatgtatcaatacaaaatgtaggttataaagaaagtatattacatgtaagagaatcttaaatgttaatagaagaatgtcagtatgagtgattttaaatttctcttttttcagctgtaattctaaattatgtacattgccttagcaataaaaataatataatgaagcgttttaataaaagaggaaacaaaataataataataataataattattattattattattattatttgagccagggtctcactgtgtcacccaggctggagtacagtggtgcaatcttggctcaccgcaacctccacctcccaggttcaagcaattctcctgcctcagcctcccaagcagctgggattacaggcacttaccatcaaacccagctaatttttgtatttttagtagagaacgggtttcaccatgttggccaggcaggtctcgaactcctgacctcaagtgatccacccacctcattatcccaaagtgttgggattacaggcgtgagccaccgcacccggccacaaaattactttaaaaactcttcttgggaggtctatactcctgctttgatatattcatgctgctttgatctctgagtttggaatctgttggggctgcctgtgtgtttatgtgacagttctccctccatgcttcacgcacagttacttgctggccatacactgtcagatggctttagaatttggtgcacaggcaaacctgggtttgaatcccaaatctacaactactagttaagtggccctgaggttgtgactttacctccaagcctctcgtctgcaaaacgtagctaagaaagagcacatattttacagtttcatgctgattcagtgagatgacccttcagacctgccggcacatggtaagtcctgaataaagctacctgtgaagagaagtgggaaggatgatgatggtggtagtggtggtggtggtcgtggtggatgtgatagtagtggtcatgatggtgatggtagtgatgggagtggagatcataatgatggtggaggtagtgatgaaggtggcagtggtggtgatggtactgacagtggttatgatggtggacatgatagtaatggtgatagtgatggtggcaaaagtggtggtgatggtgatggtggtgacagtgatggtggtgatggtgatggtggtgacagtgatggtggcaagggtgatggtagtaatcagggtgatggtggtgatggtgtcaatggtgatggtggtggtaataatggtgatggtagtgataggaatggtggcaatggtgatggtggtactaatggtgatggtggtaatggtgatagtggtgatggtgatgatgatggtcttggtggtggtgatgccagtggtagtaacggtgatggtggtgacgatgacgatagtgatggtggtgctgatagtgacggtgatgacagtggtggtgatggcagtgatggtaatagcgaagagggactgcatggttgtggtgatggtggcaaggatggtggaagtgacagtaatgctgatgctgatgatggtgatgaaagcggtcatggagatctctcatgtcccttccctggtgccaattgtaatcacaactttgcatgctaaggactgaccttttacccagtggtaatgagaattaacgagggtcctgtgaagtccccacaggaacacagtagtggcctaagaagacccatcccatggaaccccctattcccaagcaggcagctgcacatcatgcactggaatcctcttgcaagtcaaattttgctgcagatgcttctctcaccccttccattactgcctcctaaaatcacttacggaacttctactatgggccaagtgccttaagaactctgtggctattatcttattgaaagctacaaccatcttgtgatgtaggtttcttttgaaacggagtctctctctgtcacccagtggtgcgagctcagctcactgcaacctctgcctcccgggctcaagcaattctcctgcctcagcctcccgagtagctgggactacaggtgtgtaccaccacgcccggctaatttttgtatttttagtagagacggggtttcaccacgttggccaggctggtctggaactcctaacctcaggtgatccccccaccttggtctcccaaagtgctgggattacacgtgtgaggcaccgctcccggccatgatgtaggtcttataattatctcctaagtcttcagatgaggaaattgaggttcaaaacaatgatatcatttgcttaagattgtgctgctaggaaaatacaaagctaagatttggacaatgtcagcttgagtccaaagcccatgcacaaccacctcaccaagatcataaactccagtgtctaccaagatctagacatgcgacataaatacataaggccattggtgggacgtaataaggactgtggggaactggagaccaaaggctatctagagacacccacacccactttttccttaaatacagaaccaggagaccaaccactttcaatctctgcagtagacaatactacttcactgaaatcaatttctgttgcgggaatcttgtgtcccattggtggagttatacttgattactttctggatacctttcctctttcaaaatttgtcttctttttagagtcatgttgctccacccttcaaaaagtccactctaaaatataactggaaaattctcaatgaaaagaacccctgtccaggtaagggcatttctttgctgaggcctgatttgaaacaagtttaactaaagtgagtattttgaaaggaaaaaggtggtaagatttttcacaacagccgaggcctctagagatgctgatttgtaggggactttcggccataaccaattgtgagaaaagaatttcacatcagagagaaagagaggcagacacagagaactgagccaaggatcacacacaaagaaactcactgtttgcagcgactgatattttataattatagttgttttcatttctgcttgttgccttgttggttgttacccactaaggtggtgccatggtggtcgttacccactaaagaggaccagcctcctcctgtggatcataaccagccggttgaaaaagttgacatgtaaatccctctgctttggtcatgaataaaggacaaaacccttccaccatgataatgatgatgactgtgaggctggcatttaaacacatgtgctgatgtgtacattatgggtgtcaggtgtatggaaaagctgttaattcaccctacagacttaggaaactcgctcatctttttagatcttgttttccttgtttttcataacacgttcgttataagctatgttcatcttagactcttcttgaatcttgatcattctagttcaccttaagcccctttccacaccattgcccccttctttgtgcgtgataaggcatcccagcaggtttcagagtatcacataacaacacacacactccttgcccaagcagaagtggaaaaatgaatgtgagatagaagccgacatagcagctttcaagaaataaagtaaccggacatgtaatgaggcctccttgaaaatgtttccagaaccagaatatttttcttagattcatgatcacaagtaaaatatttcctattttctataggaagatactacttaccctaaagatgaaaagtccttgcctctcactgagtctggtagcttttcagaactgacagaagaggaagtacgtcgctctttatcttgagctccggtttctcaaggagtcttgtgggtggacacggaggctgcgttgttgtttggggagtttgcataatgcagggtctattagttctctttccactgccgtaatttaagtggtacattatcatggtggaccatatcaaagtgcctcagaaaatgaatggggaaatggtgatggtgatcagtgggaaatggagagggataatggagagtgaagccaacttccaaggatatgggttcaacttcaaagaggtctttttaatttaattttcactaccagagttgaaggccagagtgtgggaaggagtcagcatatctttgtattgcttcatttcctattccagttgaccaacttgggaaaatgactcatccatattcttggtttttgggatggtaccattgaagagaattacactgatagacttggctgataagattttcaacggtttcattagggtggtattctgaaattgttgtctcatttgtattagaagaatcttcgtggccgggcgcggtgactcacgcctgtaatcccagccctttgggaggccgaggcgggcagatcacgaggtcaggagatcgagaccatcctggctaacgcggtgaaaccccatctctactaaaaatacaaaaaattagccgggcatggtggcgggcgcctgtagtcccagctactcaggaggctgaggcaggagaatggcgtgaacccgggaggcggcggagcttgcagtgagcggagattgcgccactgcactctaggctgggcgacagagcgagattctatctcaaaaaaaaaaaaaaaaaaaaagaagaagaatcttcgtaagatccagcatgaatatggcaaatatgccctaatttggcaagtccaaatacacatcaagcaatttacttcttgtcttgattttattacatatatgaaacgtggtcttattatccctaacgttaacaccttcatctttctgttttccatttatttttataaattcatgagtaaatgcaataaattatgcaaataataacatagatatggctggatagctgggctggtaatcacctcctccatgtaccactcaaaatgtttgctgcatcatcttttttttttttgggatggagtttcttttgctcttgtcacccaggctggagtgcaatggcacaatcttggctcactgcaacctctgcctcccgggttcaagcgattctcctgccttagcctccccagtagctgggattacaggcacacaccgccacgcccagctaatttttgtgtttttagtagagacgggatttcctccatgttggccaggctggtctcgaactcctaaccttaggtgatccgcctgcatcggcctcccaaagtgttgggattacagacgtgagccaccgcgcccagcctgctgcatcatcttttaaatgacaaatgaaagacggattaagcctgccattgtcagctgtactgaagacaaaattgtctgcatgtaaaactgaaatgcctaaacccaaaggaagtccctgaaattctgagcattctgtgtgctcatagtccaattctgcacgcgatagattgcaccatgggatggaagaattctctatctttaagtgtagtctctggctctaatcttggccatgtgactggctttggccaatgaaacaacagctaacaggatgcaaaaaaaaaatgctagcctgctggagtgtaagaggccatgttgaagaaaccaaggcttgatagacaataattcatcactttggttgccaatctgccgatcaccacatgtgtgggtaaggccgtgtcagatcatctattcaaccagcatacccaccaactgataaacacgtatgaatggaacaaacaagccagctcagatctgaagaatgaccacagaatcatgaattaaatgaaatagttgttattttaagaaaaaaaaaattcaatggggagaggatggtttgttatacacccaaggccaactgagacacttcccaaggtgtcctggaataggttatttgcactcttgttgtcagacatggtattatttaactctacctcccaaccacagctgattggaacatggattggtccatatggcaaacaacaacttatgagatggccaagaagataagtgtaccttcaaacagttctgtatattgaatattgactgaccaatccattcagactgtgtctctcttgagggatctgaataagtcccagaaagggatacagacagcagcgtgactcatgagctgcaatgaacaaattaagaaacaacaaaagcagaagccgttggataggagaatctgttgatgaccttcctctccaatctctacgttgggtatctcaccttgcctcggtagagcagtacagtacactgtcaccgtcagagaaaccagcccatttcaaaacccaaggagcaaatgttcggtctaggaacgtttgatatggcctggtcatttcccaaactttaacaagcatttaacaattcactttgggcaattgtgagaaacacctgttctccatccttctgcaaccggccctgtgcattaagaggtttccctgtatgttctggatcatgaggcacttgtgtactctgctgtgaagctggatttgaccagggttagccccggaagaagaaaagacagctgatgcagctagagatggggtgtttacttctctagcttcctcttccctgccagcattgcacatttggacagaggttgggtttttctgctgtaggctaaagccctttccaggttcttataaatgctccctgccttcatgccttcaagccaacgagtggttggcttcccacattgctaatcccagggtgccattagcaatggcacccacaatcccattggattacccacattgctaatcccagggtgcctcaccatcctctgttgatttcccttagccctaccctcacctaaataaacagtcctttcattaaaccctcctcatttaactcatttgagtgggcagctgtttctccccatgtcaccaattaatacacactttggtcctgattctgcttattctagctttcttatcaactgtcatagaagaggaaacccttatttcaagaaaagaagaaaacaccattctttgaccaacatgtggaactgaaccacaaaacacaaatatcacttcctcctttgccaatcatttaagaggaattgtttctcagcaaacttcccatgccttgaaatagtggtgttcagtatgtgaattggctggaaatatggcgtaggtggtccacttggaaagaatgggatataggaatcagagcttagaacctgggctctgtcagaatggcagcccagacttgatgcctaaaaggtcatgttcagtggctcgtacgtatgatctttcttgccagttcactggacaccaatggaattatgcccttagataatattgtcacctttgtttctaacaaacctcttatgctaagtgtgcttggtgcctgagatggtattaaaacatgtccccacactttctgacattcttttctggagagctgaagtctatgtcttatctccttgtatctgggctttgtaacttcttaactaatagaactgacaatagaaaataactctatgcatcttacaggaccagatcttatcttaagacagtagtagcttctttttttttttttttttttttttttttgagacggagtcttgctctgtcgcccaggctggagtgcagtggcatgatcttggctcactgcaacctccccctctcgggttcaagcgattctccgcttcagccttccaagcagctgggactacaggcgcttgccaccacccccggctaatttttgtatttttagtagagatggggtttcaccatgttggccaggctgtctcaaactcctgacctcatgatccacccgcctcagcctcccaaagtgctgggattacaggagtgagccaccgcatccagcccatgacgttatttataaaaccaagagtgcacatgtaccctagaacttaaagtataaaaaaaaaaccaagagtgatataaaaaaaaaaaccaagagtgtctcttcaggagacagaatgtcagaataacattctgttgctgtgcagtagattgacacacggtctttcccagatgtattcattcaacaaacattataaacccaatcagtgaccccaatctcctgctaggtaatacactttcagagataaatcagacaaggaacttgtctgattatgatctaacatgatgagtattacacataaaagatcaataataactttggacacaatgaaacaaaaacgttaagtcaggaggtaaccagatgactttgaactgatgatggaaagcttttctatgagcaaaaattaaataaacttcaaattagctgggcacgggggctcatgcttgtagtcccagcactttgggacgctgaggcaggtaagatcacttgaggtcaggagtttgagaccagcctggccaacgtggtgaaaccccatctactaaaaatacaaaaattagccatgcatggtggtgggcacctgtaatcccagctactcaggaggctgaggtgggagaatggcttgaacccacaagacagaggctgcagtgagctgagatcatgccactgccctccagcctgggcgacagaacgcgacttgttctcaaaaaggaaaaaagaaaccctgtccctgttaataactcaaaaaatagctgggcatggtggcaggtgcctgtaattccagctacttgggaggttgaggcaggagaattgcttgaacctgggaggcgaggttgcagtgagctgagattgcgccactgcactccagcctgggcgacagagtgaaactgtgtctcaataaaataaaataaaataaacttgaaattactaattactatatttattttagagatagagacggggtcttgctctgttgcccaggctagagtgaagtggcatgatcaagactcactgtagccttgacatcctgggctcaagcaatcctcccacctcagcctcccaagtagctgagatcacaggtgtccaccaccatacctggctactttttggtggaggggagtagagacagagtcttgctatgttccctgggctggttgtgaactcctgggctcaagcaatcttccctctttggactcccaaagtgctgggattataggtatcagccactgtgcctggtcaaattactacatttctaatgatgtatttttacaatttgggaaagtttgggcaacttctgtgtagtcataaatgtttttctttttcttttcttttctttttttttaaattgagacagagtctcgctctgttgccaggctggagtgcagtggcatgatctcagctcactgcaacctctgcctcctgggttcaagtgattctcctgcctcagcctcctgagtagctgggactacaggcgcacaccaccactcccagctaatttttgtatttttggtagagacagggtttcaccacgttggccaggatggtctctacttcttgactttgtgctcctcctgcctcggcctcccaaagttgctgggattacaggcgtgagccaacgcgcccggctcataaatgtttttcttcaatcagacaataaaagagacatataaatttcctcccactgataacaccctactgattttaaaagcactcaaatagtagagtgttaagattatagcttgaaaatgtttttaaggctgaaataacatcgttaatggaccaggcacggtggctcacacctgtattcccagcactttgggagaccaaggtgggcggatcacctgaggtcaggagttcaagaccagcctggtcaacatggtgaaaccctgtctttactaaaaatacaaaaattagttgggcatggtggcgcatacctgtagtcccaggtacttgggaggctgaggcaggagaattgcttgaacctgggaggcggagattgcagtgagccgagatcttgccactgcactccagcctgggtgtcagagtgagactccatctcaaaaaaaaaaaaaaaaaatatatatatatatacatatatatatagaaatacagaaatatatttaaatataaatatatattacatttagttaatggttcattttcttcccagaagttgattttaaaaatattgatgaatttgcttccattaaaaccaggaaagagctgggcatggtggtgtgcacctgtattctcagctactcaggaggctgaggtgggagaatggtttgagcccaggaggtcaaggctgcagtaagcccagatcgcacaactgcactctagcctgggagacagagcaaaaacgtgactccaaaaataataaaaaataaatcttacaaaaatttaaaaacaaacaggaaattagagttttaataattttggtttggggatacataaaacatttatacaatgctttaaattctaatacactttccaatttttcagtattttttcaactaatgctctgggaggataagcgtgttgtacgtggtcaataaatatttgagtaaatggatctgtattttcttgcataccataaattattcggattataagagggtaaatttatttcatgttatatgtgtgggattacagagccacgcagtttttactgcgtctcctttctccccctagtggagacaaatgataccacagggataacagaacggcaagtgcagtttgatgatagtaagaaaaatccctgttgtggaggtcacagctttacctacttaccttaaacacaggagttttctggccaggcgcggtggctcacgcctgtaatcccaacactttaggagaccgaggcgggtggatcacctgaggtcgagagtttgaggccagcctgaccaaaatggagaatctccgtctctactaaaaatacagaattagccaggcatggtggcgcatgcccgtaatcccagctacctgggaggctgaagcaggagaatcgcttgaacccgggaggcaaaggttgcagtgagccaagatcgtgccactgcactctagcctgaatgacagaaccagactctgtcaaaaaaaaaaaaaaggaaacagagttggctaaggcgactatatcttatttatttatttattgacctttttccagtacaagtttaatattcattagaggagtttttttcatgtgatgggggagaatggcggcaagtagtaggatctgctgaaggcaggagcttcactgtgatgatggcgccccacacctcgggtttcctgcagcccaggatctgatagccggccatggtatcatcacatattttttcaacaacgatgggacatggtctgcctcatctcccggggacaccaggagcgctttccagactccgggtgatcggggagcagctcccagtatggccttagttagcgtctcctcctggcccatgttaatccataggcgccccatgatgagggctagtgagggcctctccctggagtcaacggccagaattgtgtttatgaggcattctcgttctatggaaacaaggaatgggatcgcctgtcaccattcacacagtattagtgtcgtcctcagccccacaaaagtctgcccaacagatggcagtcctcggccaccatggtgtagacagtggctcccaggctccacacgcccaccagggtacatcgtacttttgtcccggggaacagttctgaggctgtataagaggagctcccaccgaaggggatcagctttcagcctacggtgaatctggtatcaaagccagcgtctgttgtttccatgtcgtgctgagcctcctcagggaagttctctgacttcagatccctgtggataatttccttctggaagcctcactgcatggaatatcctatttgctggaacttgcctcaggcctcttcccccttcaagaagaattcgagggtgaagtcggatagctctcccgagctggcttaatccatgactaggaacagcctgttctcggtgccagccacgtgggtctgatgatcttcgggtgattaagggccttcatcatatggtccctgcagtacagaccctgggggctgcaggagccctgctgccctgttggggtgacctccacagccatcttggtcccagtgagaatgtgctgggccagctgccttgacttctgcaaagctgccctggctgatgaccttgaggagcctatgatcatcagtaagggactcctcggaggcagaagtggttccaaggccctgcagcgtggtgacctcccggctacacatctcagctaggaatgccaactgagaatactacccctacaaactttgctaaccaggaacacgaatgacacggctggaggtgtctgctgacatgtgagggtggcctctggtcacctccatgccagggacaacgttcgaggccaactctaccatggctgcacccaggaaccggatgatgtcatcaggaatcatctctcccggcctcttggccctgctgacttccctctgagttgatgtcattctcaggtgggctcttcctccaacgtggcaagatggcacccacagctccagcagcctaacggaaatagatcttctccgcccagatgtttccaagacaatgacctgacctttggcactgagtgtgtcacatgagcaggccttagccaatcactgtggacaaagaagatgggatcagcccattggccaggttgaggtcatgtggccactgtctctatggaaacttgggagatgcttaactgttttcagttgggagactctgtggtggctgagagagcaggttcaggctcgaaaggtcactacaactggatatgcaactgcagaagaatgactttggacgcctacctcacaggatatataaaaaatgaatgaaacaacagctaacaaggggccagaaagtgctagtctcctggagtgtatgatacacaaaaatcagatcaaaatcgatcagtgttataaatggaaacgttgaaactagaaagctattagaagcaaacaaagggtaattttttataaccccatctaaggtcatgaaaacccatagtgattttagagatgacaccaaattacaagcaaaaaaacaaaaagtagatacatttcagttcactattttgtacactctatgagttttaacaaatgtgtaataacctgtacccatcattatgtgtcatacagaatggtttcgctgccctgaaaatcccctgtactccacggccttagaggtctggcggtgtgagcctcgtcattgatgttttgggtggtggggaatgtaggtgtttttcagttactatcctccgctttagggcagaaaagagaggaattccccacctagccccaggttttcataaaaccataagtaatgaaggaacccaatactgcaggtgaagaaatgaatcgtcaggatatattgatccgtgggattatcatagtaaaaatagctaagaaataaggaaggagatcacattttagaacccaacaatgcagcttgaattctgcatggatcttgagctactcatttggactttgtgaattcagtgtgaatgttgcttcccaggcaatgggggacgcatgcacttgccggtgctcgtgcacacgggattggcgtgcagatgtgtgcgggccgcacaggggatgttctgcagctgccctgggccctgggtgtgtgaggctgcccccctgccatgttgaactttaaagggtgtgatgccggaatgttgttggctgagtccggactggcatgagcccttctgatcctgttacctcacaccttgcctggcatcatcccaaaaggcgtttgtgcaaatggcttattgacacgggcttgggaccaaatccacccaaggggagggggtccctggggccttgctatctgtggacttggatgaaatcatagtgcctgggggtggagaggatgaccctcagatatgttttccaactcgtgtttttcttctagatgcaggaccccagatgcagagccccagggcatagaggattccagattcttgcaggggactggaggaggctcggctgaaaggagtcagggctgcgagggtaggggacagattcgagtagtttctccatttcacagcaataattactgccccccaccacacacacacacacacacacacacacacatgcacacacatgatatatgcatacacctgtctgtgctgcaagttccccttttgctcagacttagggttttgcagacacttctaaggaaacaaagatgttcccttttatttttgtctacttgctcctgaagcttcccctccatgtgtgcaatatgactgatgccaactgctttctttctttcttttttcttttcttctctctctctctctctttttttttttgagacggaatttcactcttgttgcccaggctggagtgcagtggtgtggtctcggctcactgccacctctgcctcccgggttcaagcgattctcctgcctcagcctcctgagtagctgggattacaggtgcccaccaccacaccaggctaatttttgtatttttagtagagacagggtttcaccatgttggccaagctggtctcgaactcgtgacctcaggtgatcaacccgcttcggcctcccaaagtgctgggattacaggcatgcgccactgcgtccagcctattttttacattttaaatcaggcaattataatatatcaaacatctatattccaatcacccagaatggagaattactgaatttggttatattcactttgagtcttttaaaaataacattttacaaacaagtagtctcccgttggctccccagacaatccaatttctcttctccctgtttcccagagcaggcaaatatcattatttattcggtgtatatacttctattctgaatttcatacacatacattatatacatccaaatacatattaataacatttaagcatgtattaatatacaaaacacatatatccgttaacattacctaggattgtttagtgcatttacatttttacatatatacaaaatacgtatacttattatgtttgattctattttttggttaacttgttctttaaagatgaatctagctgggcccgaggcaggcagatcacctgaagtcaggagttcgagaccagtctggccaacatggtgaaaccctgtctctactaaaaatacaaaattagccgggtatggtggtgggcgcctgtaatctcagctactcgggaggctgaggcaggagaattgcttgaacccaggaggcagaggttgcagagagccaagatgtgccactgcactccagcctgggagacagagcaaaaccatgttaaaaaaaaaaaaaaaaagaatcctctggtcttgggaatctaatgccctatattataattcatagccagacacagagtaattacttgtttgcacccagcgttctaaccacaggaagggaatgggggaagtgggtttttgcaagaacctgctttgaggtgcacacctccacagagctaagcaatctagtctgggagataatactcatacgtgtccaggaaatgaggaacaaccagatagcacataattaaaacaccatattttatgatgcagatcatttaagaaatgtgggaggctggatgcagtggctcatgcctgtaatcccagcactttgggaggctgaggcgagtggatcaagaggtcaggagttcaagaccagcctggccaacatggtgaaaccccgcctctactaaaaatataaaaattagccaggcgtggtggcgggcacccgcaatcccagctactctggaggctgaggcaggggaatcacttgaacccgggaggcagaggttgctgtgagccgagatcatgccactgcactccagcctgggcaacaagagtgaaattccatcacacaaaaagaaagaaaaggaaaaaagaaaagaaaagaacaggaaagaaagaaagatgggatgagtcacactgcacacttgcagaagtttcaggagcaagatgacaaaaattaaagggaacatctttgtttccttagaagtgtctgcaaaaccctaagtctgagcaaagggggaacttgcagcaccagacaggtgtatgcatatatcatgtgtgaatatgtgtatgtgtgtgtggtggggggcggtaattattgctgtgaaatggagaaactactcaaatctctcccccaccctcgcagccctgactcctttcagccgagcctcctccagtcccctgtaagaatctgaaatcctctatgccctggggctctgcatctggggtcctgcatctagaagaaaaacacgagttggaaaacatatctgagggtcatcctctccacccccaggcactatgatttcatccaagtccacagatagcaaggccccagggaccccctccccttgggtggatttggtcccaagcccgtgtcaataagccatttgcacaaacgccttttgggatgatgccaggcaaggtgtgaggtaacaggatcagaagggctcatgccagtccggactcagccaacaacattccggcatcacaccctttaaagttcaacatggcaggggggcagcctcacacacccagggcccagggcagctgcagaacatcccctgtgcggcccgcacacatctgcacgccaatcccgtgtgcacgagcaccggcaagtgcatgcgtcccccattgcctgggaagcaacattcacactgaattcacaaagtccaaatgagtagctcaagatccatgcagaattcaagctgcattgttgggttctaaaatgtgatctccttccttatttcttagctatttttactatgataatcccacggatcaatatatcctgacgattcatttcttcacctgcagtattgggttccttcattacttatggttttatgaaaacctggggctaggtggggaattcctctcttttctgccctaaagcggaggatagtaactgaaaaacacctacattccccaccacccaaaacatcaatgacgaggctcacaccgccagacctctatctaaagccgtgaagtacaggggattttcagggcagtgaaaccattctgtatgacacagtaatgatgggtacaggttattacacatttgttaaaactcatagagtgtacaaaataaagagtgaactgaaatgtatctgctttttttcttgtacttttggtgtcatctctaaaatcactatgggtttttatgacctaagatatggatcataaaaaattaccctttgtttgcttctaaaagctttctagtttcaaggtttatgtttacgacactgatcgattttgagttgatttttgtgtatcataacgtgcattagactagcactttctggccccttgttaactgttgttttcattcatttttctatatcctgtgaggtaggtgtccaaagtcattctgcagttggatatccagttgtagtgaccttccgagtctgaacctgctctctcagccatcacagcgtctcccaactgagaacagctgagcagctcccaactttccatggagacagtggccacatgacctcaacatggccaatccgcagatcccatcctctttgtccacagtgattggctaaggcctgctcatgtgacacactcagtgccaaaggtcaggttgttgtcttggaaacatccgggagaagatctatttcagttaggctgctggggctgtgggtgccatcttgtcaccttggaggaagagcccacctgagaacgacatcaactcagagggaagtcagcagagccaagaggccgggagaggtgattcccggtgacatcatctggctcctgggtgcagccatggtagagttggcctcgaacgttgtccctggcatggaggtgaccagaggtcaccctcacatgtcagcagacacctccagctgtgtcattcttgcttcttgttggcaaagtttgtaggggtagtattctcagttggcattcctagctgagatgtgtagctgggaggtcaccacgccgcagggccttgggaccagttctgcctccgaggagtcccttactgatgatcataggctcctcaaggtcatcagccagggcagctttgcagaagtcaaggcagctggcccagcacattctcactgggaccaagatggctgtggaggtcaccccaacagggcagcagggctcctgcagcccccaggatctgtactgcagggtccatatgatgaaggcccttaatcacccgaagatcatcagacccacgtggctggcaccgagaacaggctgttcctagtcatggattaagccagctcgggagagctatccgacttcaccctccaattctccttgaagggggaagaggcctgaggcaagttccagcaaataggatattccatgcagtgaggcttccagaaggaaattatccacagggatctgaagccagagaacttccctgaggaggctcagcacgacatggaaacaacagactctggctttgataccagattcaccgtaggctgaaagctgatccccttcggtgggagctcctcttacgcagcctcggaactgttcccggaggcaaaagtacgatggactccggtgggcgtgtggagcctgggagtcactgtctacaccatggtggccgaggactgccatctgttgggcagacttttgtggggctgaggaggacactaatactctgtgaacgatgacaggagatcccgtttctcatttccatagaactagaacgcctcataaacacaattctggcccttgactccagggagaggccctcactagaccacatcatggggcgcccatgcgttaacatgggtcaggaggagacataaataaggccatactgggagctgctccccgatcacccggcgtctggaaagctctcgtggtgtccccgggagatgaggccaaccacgtcccatccttgtaggaacaaaaatgtaggaacaaaaatttttagtagagacggggtttctccattttggtcagggtggtctcgaactcctgaccacaggtgatccactcgcctcggcctcccaaagtgctgggattacaggcgtgaaccactgcgcccggcccacaacatggatttttcttactataaacatcaagctacacttgccacagtcttttaccgctgtggtctcatttgtctccaccagagggagaaaggagactcaataaaaactgcatggttctcggccgggcatggtgcctcacgcctgtaatcccagcactttgggaggccgaggcgggtggatcactgacgtcaggagttcgagaccagaccagcctggccaacatggtgaaaccctgtctctacaactactactactaataataataatacaaaaattagctggacgtggtggtgtgcacctgtgatcccagctactcgggaggctgaggcaggagaatcacttgaacccgggaggcaaaggttacagtgatccgaaatcacaccattacactccagccttgggcaacactccatctcaaaaagaaagaaagaaaaaaacctgcatggttctctattcccataaatatactgcaaaataactttgccctcttataatctgagtgatttatgatgtccaaaaaaatagattctttcactcaagaagtatttattgaccaccgacaacatgccgtttccccagaacattaaggcagttcaaaaaatattgaaaaatggaaaagtaagcatattggaacataaaacattgtttaaatatttatccccaaactattaaaaattttaatttcctgctctcaaatgtttgtaaaaacttttttattttttcatatttttggagtcaaggtcttgctctgtcacccagactggagtgtagtggtacgattacagctcactgcagcctcgacctcctgggctcaagcgatcctcccacctcagcctctggagtagctgggatgccagccaatccacatactgaataccactctttcagggcatgggaagtttgctgagaaacaattccttttacatgactgacaaaggaggaaatgatgtttgtgttttgtgcttcagttccacatgttggtcaaagaatagataatctaagatagtgttactcactcatcttgtggttggaagttggcaaccagagtgatgaattgttgactgccaagccttgtttctctcccacgtggcctcttacactccagcaggtcagcactttttgacatccagttaattgttgtttcattaagttttgtataccacatgaggtaggggtctaacttcattctttttcatttggatatccagttgtaaaagcaccatttgttaaaaatactgatttttcactttgggaggctgaggctggtggatcacttgagatcaggagtccaagaccagcctggtcaacatggtgaaaccccttctgtactaaaaatacaaaaattagccaggcatggtggcatgcccctgtaatcccagctactcaggaggctaaggcacatgaatcgcttgaacccaagaggcggaggctgcagtgagccgagactgcgccactgctctccagcctgggtgacagagtgagactgtcttttccccattgaatggtctttgtgcacttgtcaaaaaccagttagctatggatatgggtttatttctggactctcaattctaccccattgttccatgaccctatccttatttcaatatcacacctgtgattacagaatttttgtattaagtttggtaattggaaaacatgggttttccaactttgtttttctttgacaagattgtttcaaaccttgaaattctacatattaataaattataggatagtttctccatttctgcaaaaagggccactgggattttgataaggatttcattgaatctatacattgctttggattgtgttgtaatcttaattattctaagtcctctgatccatgaatatgggatgtctttccatatatttaagctttcttcattactttcagcaatgttttctagtttttagcacaaatctctcaccttttaagttaaattcatacctaggtgctctactcttttggctgttactataaataaaattatttccttaattttctctttggagaattcgtttgaagtatatagaaacacaactgagttttgcatattgatcttgtaccctggagccttaaaaatttgctctaatcattttttgtggattctttgagattgcttgtgtattggatcttgtcatctgggaatcaggataattttacttcttcctttccaatttgaatgccttttatttgcttttcttgcctaatttttctagctaaaactttcagaacaatgtttaataacgaagtgaaaatgggctccttgtcttcgtactggacttagaggtgaagcagccagtcttttgctatcaattatgatgttagctgtggtttctgatttatgtcctctatcatgttaaggaagttccctcttattatttctgaatgtgtttttattaaaaagtattggatttgatcaaatgaacagctgcatttttttaaagcatgattttttcttccttttatttttattttatttatttatttatctttgagacagagtctcgctctgtcaccaggctggagtgcagtgcagtggcatgatctcagctcactgcaacctctgcctcccagattgaagcaattctcctgcctcagcctcccgaatagctgggactacaggcgagtgccaccacgcccagccaatttttgtacttttagtagacacggggtttcaccatgttggccggaattgtctcgatctcttgacctcatgatctgcctgcctcggcctcctaaagtgctgggattacaggcgtgagccacccaccgccttcttccttttattaatgtggtagattacattgattgatttaactaaattgaatgtcctttgctttcctggggtattttccatttggacatggtatgtaatttttcaaatacgctattagatttgatttgctagtattttattggagatttttaatctgttatcttaaaggtattggtctatagttttcttgttatgtctttgtctggtgtgttaccagtgaaatgctggcctcatagaataagttacaatgtgttccctccttttctattttttgggggattttaaaggtttgatcagattcactagtgaggccatctaattgtgagcttttctttgtaggactgtttttattactaattcagccttttttcatattatagatctattcaaactttgtattttttcttgaatttgctttgttttttatttttgtttttgttttgagacaaggtctcactctgtggcccaggctggagtgcagtagcgagatcttggctcactgcaacctctgcccccttggttcaagcaattcttgtgcctcagccaccgagtagctggggttacaggtgtgcaccaccacgcctggctattttttgtatttttagtagagatggggtttcaccatgttgccaggctggtctcaaactactggcctcatgtgatccgcccacctcagcctaccaaagtgctgggattacagtcatgagccatcacacccggccttcttggatctgttttaataatttgtgcattttaaggaatttgctcatctacattacagaatttattcatgtatacttcattatattctccttttttatttctgcaaggtcagtaataatgtctccatgttcatctctaatttatttatttgcatttgccctctgtcatcgaggacagactacctaaaggtttgtcagtttgccaatcttgaagaaccaacttgtggtgtcactgattttctctgtgctttttatattctctatttcatgtacattcattctaatctttatttctttctgtctgcccacttttaatttactttgctattctttttgtagttccttgagattaaaagttagattattaatttgataccttttttcttttttgaagaaacttgttaaaggtttaaatttgcgagcaatgtttctacagaatctcacagacattgatatgttgtgtttccaatttcatttctctcaagatattttctaatttcacttgtgcattcttttttgttttgtttcgttttgtttgagatggagtctcactctgttgcccaggctgtggagtgcagtggcgcaatcttggctcactgcaacctctacctcctgggtttatgcgattctcctgcctcagcccacccctgccccaagtagctgggattataggcgcacgccaccacgcccggctaatttttgtacttttaatagagacggggtttcaccatgttggccaggctggtcttgaactcctgacctcaggtgatccacccgcctcggcctcccaaagtgctggaattacaggcgtgagccactgcgcccagccgtgcattcttctttaaaccattggttgtttatgagcctgctatttaatttccacatatctgaatttcccagcattctttttattgtgaatttctagcttctttctagagcaatcttggaagatactttgtatagtttcagttttttttaatttgctgtgacctgtcccatggcctaacatatggtctatcctggagaatgctccattgcacttgagaggggcgactgctccgctgttggtaaatgcagtgctctacgtaggctttgcgtccaagttggtctatagtttattcaaatcccccctttcatgattaatgcgctgtctgttgggtctatgcattattgcaagggccatattgatgtctccagcttttgtaaaaccatctattttccgccttaaattttgttcatctttacttcttatatttctggtctccatggtttcgtgagtacattgtcatagttttgtttcttcttactgaattgacacttttatcagcatctacagttgaaccttgaacatcttgggggtccgggcactgaccccacaccaccagcagttgaaaatccgcatataggccgggcacggtggctcacgcctgtaatcccagcactttgggaggccgaagtgggcagatcacctgaggtgaagagttcgagaccagactggctaacatggcaaaacactgtctctattaaaaatacaaaaattggccaggcgtggtggtgggcacttgtagtcccagctacttgggaggctgaggcagaagaatcgcttgaacccaggaggcggaggttgaagtgagctgagatcgtgccattgcactccagcctggtgacagagcaagactctctctctcaaaaaataaataaataaatacataataaaataaagttaaaaaaaggaaaaatgtaactacaaaacactaaatgatccttcagcatagaataatttaattacttcttgtttgaaacattatcttttgtaaaaacaaaaaaaaaattaccttttgtatacaatgttcaccatttgggtaacgagtaccctagaaacccaatccgtaccattcagcaaaatatattaataaaatcaacaaatacatgtacccctgaatctaaaaaataaaaatgaaaatgtaatttcaaaataaaaatttaatgttaaaatcagtgtactttattaaattatgtaatgtaatcatatcacttaaaaagtatataatttaattttattttttagaatttcatttaagattaaattagaatttagtaggaaaactaattaacatcaggccaggcacagtgactcacacctgcaatcccagcactttgggaggccaaagcaggcggatcacctgaggtcgggagtttgagaccagcctgaccaacatggtgaaacccgcatctctaccaaaaatacaaaattagccaggtgtggtggtgggcgcctgtaatcccagctactcaggaggctgaggcaggagaatcgcttgaacccgggaggcaggggttgcggtgagccaagatcgcgccattgcactccagcccgggcaacaagagggaaactctgtctcaaaaaaaacaagaaaagaaaagaaaagaaaagaaaaactaataaaaatcatggtaaacggacattgaggtgtacaatgacatataaaggtctccttctttgccttacgaaacccaatttctcgccacaaaaccatccactccttacactgttgcctttcaaatgcttttaataaagaactggtggggaagtacaaagtgtgacaattcatagcaggaaagaggacgggcattaaaagatagggattcaaaacccaggactgtccccactgactcaccccccaactgcggggccacaccccacagcttctcagcaccccctcctcctgcacttcatccacctgtcacatttctgcccgcctggccagcctgtctgcctgcaaggccttggccagtctctccctggctttcttcaccctcctggcctgtctccggatatctgcaggagtcaccaattggccagagaggggcggtgggagctgacaacccattcctggggttggcccccctgccacagctggaaaccgcccaggggtgggctcaagcgggctgcgcacacgctcagcaccagctctgtccagagattcaccggccgtccccggtgcaaggatacttaagacgctctccaaatgcagtggacttgaaccttctccttggctgctgcagggctgcagggcctgcagtctccggtaggcgcagagttgctgcggcttctccaggtgctcgtccccttttctgcgtctgacctggttgtcaggatgagacctgatccttgtcaccggcctccggaagatgcagctggtgagtctcatggggagagcagacctcgcagctcgtctccgatgggccttggccatgtggatttctcgtttcttctgtaaagcccagggcatcatgttccttttgagcttcccctttcaaaagaaaagaaaatgtgaaatttcaaccaaatggagacaggagaagatcagctgtggggggcttctctcagctcagtggaatcttcccaccagcctctctttctggggaaatgtgtctcaaatggcagtgtacatcctcagcacctgcagggtttgctgaagtcagatatgtggacctgaacccaagtaagtctggggtggaacctagagtctgcatttctccgtgtgaccctgatgctgctggcaggagctccaggcattgacactgggtcctgggacctcatcgggctgatgcgagtcaaggactaaatgctcaaggtcatgacccagggtcagttccagaccttgtccctcctcatcctcctcagaggacacccctctcttctcttccctgccactgtcagctacacagatgctggtgcctcctaacccatccccaacaggacaccgggatcccagacttccctgttcaccaagacctcacgcttctctgtatctctttctgctgtgcttcaggacacaacgtcattttcatagctccttgactctctggtttccaaagaaatcgtgcactcgccaccttaaatactcactgccacacccagatcccaccttcacctgaacacctcctgctcatgaagaaaaacctcagaaacaccatgttgctttctgtttctaataagctcaattaactagagttacaccatgagagaatcttttgatgacatactgagaaagatgattaagcccctcctaagatttgaaatcctttcttgctctaaatcaattggaagactctagtctcataaagctgtttcagatacaaacataaagccttcatttctgtccttctcatttcatttctgttgtcctggcattaagattaatactaccccttacacgacccaaggtgttcccctttggagggaaaattatttagtctccttagttacagggcacttatgatgtgccaagctgtgcagtagaacccctgatccagaagtaaactgcagaaatcaccactctgttgattttcatcttggtgagaaggaagacataataaacacactaaaaacaaatttccgatagggtatcagatataattaagttccatgatgaagaagaagggagagacagagagggatggaaggaggagaaacagagaaacagaaaagaaagaaattcactacaatgaatcatgacagtgagtttagggaaggactaaccaatcatgatatttaaccagagaactaaaatttttttttaaagggaccaagcaatttctggttcaagaactttccagagagagagacaatttgaagactgcaaggccaagtaatacctcttttccttcttagtgatgttgttggacttttaaaaaatcagggctattatccccagatagctccgtgaacaaaaaattagaatattgttgaatattttgaatattacttgagtattactcaacaaatattaacacctagggtataagtttccacgagatagcatctagttttgagaacaacttgctaaactgtgaagatgttttacagaaagaaaaaggaatacaaatggacattattttggtcaatagtcaataaggatcccatactcaccagaacaggcaggcttggaaaagaggtgaacgcaggttctcccatagctgtagagttcctcctgctgaccccactcctgaggcacagacagcccttggcttgccggaaaatgcagtggcttctgcatctagctcctcttttatagagggagtgataatgcaatcagtggataatccatagggaacgccctgtctccacccattggatttgaagcatttctaaatctttatacagaaaccaatatggtgttaccaacacagaatgtcagtagaaaaagaatttaatccgtgtgtgtggcggggtggtatttacagttaatatcggcattttagatatgtttccttttcctcccattctctcaaacatctttgaaagcattctacggaaataagaatggaattgtcggccgggtgcggtggctcaatcctgtaatcccagcactttgagaggccgagtcgggcggatcacctgaggtcaggagttcgagaccagcctcaacatggagaaaccccgtctctactaaaaatacaaaattaactgggcatgatggtgcatgcctgtaatcccagctacccgggaggctgaggcaggagaatggtgtgaacttgggaggcaaaggttgcagtgagccgagatagtgccactacactccagcctgggcgacagagtgagactccatctcaaaaaaaaaaaaaaaaaaaaaaaaaaaaagagagaagaaacaaaaagaaaaacacctaataaataaacagacctaataaaaaagaaatacagtctcagcagccttggtctatgcagtgactactcagttttttcctattatttttcatgatgttttcattgtataaatcttcctggtttgatctttgaggaggcagacagatgctggctattttaccaatttggacctggggctaggaagtttaagacacaattagcttacgtatttaatcacattgtggcaatttcaatgcaccgatgcctcccctgcaaactccaatatatagacacaatataccgcgctctagcctgggcgacagagtgagactccatctaaaaaaaaaaaaagaaagatctcctattaatgaaaatgcagagagaaatgggtgttagaaaatcatattggaaaagatatttgcatgatgtgcatccagtaaagtacatcaagccagaatacagactagaaagatgtccatcaaatgaaaaaaaatactaaaaattgatgtgcaaaatgagtggaaaacttcagtaggcactattgaagagagaataaataaatggtcaatacaatcctgaacacatgcccaaattctgtttagcttcagataaacgctgatgaaaaatcactatgagatactcatatacacttctgtttggctaaaatgaaaaaatagcaatgccaagtgcagacatggctatggagcaatcataccattcacgtgtagccagtgagagtttaaatgggaagaaatgtactttatttgtatcccaacctgaacgtacattggaatctcctggagagtttgaaaaactaatggtagcacacacccctacacatttttattccactgatgttggatgcagcctaggctataggaattttacaatcccctaaagaccaaaaggacaggcaaggatgacacaccacttccctggttggtttggagtctgtggttttgaactttggtttgcagaaaacacacctgggagtgttttcacacctgggtgccttccagaccagtgtctccggatgcctacgggaggggccaggaaatcagaaatcatttatttatttatttatttatttagagtctccctctgttgcccaggctggagtgcaatgacgtgatctcggctcactgcaacctccacctcccgggtttaagcaattctcctgcctcagcctcccaagtagctgggtttacaggcccaagacaccacgcccagctaatttttttttcttggagacagagtcttgctctgttgcccaggctggagtgcaatgacgtgatctcggctcactgcaacctccacctgccaggttcaagcagttctcctgcctcagccttccaagttccaagtagctgggattacaggcgcctgccaccacatccggctattttttgtattttttttagtagagacgaggtatcaccacgtcggccaggctggtctcaaactcccgacctcaggtgatccacctgcctcagcctcccaaagtgctgggatgacaggcatgagccaccacgcccagccacgcccagctaatttttgtattcttggtagagtcagggtttcatcatgttggccaggctggtcttgtcctgacctcaagtgatctgcccacctcagcctcccaaacagaatttattgttattattatttttaagaactccaagtcctgccagggcagggtggtttacacctgttatcccagcactctgggaggccgaggcggacagatcatttgaggtcaggagtttgtgaccagcctggccaacttggtgaaaccccatctctactaaaaatacaaaaattaggccgggtgtggtggctcacgcctgtaatcctagcactttaggaggccgaggtggttggatcacttgaggtcaggagtttaagaccagcctggccaacatggtgaaacctcatcgctactaaaaatacaaaaattagctgggcgtggtggcaggtgcctgtaatcccagctactcaggaggctgaggcaggataattgcttgaacccagggggcagaggttgcagtgagccaagatcgcaccagtgcactccagcctgcacgacagagcaagactctgtttcgaaaaaaaaaaaaaatacaaaagttagctaggcttggtggtgggcacctgtaataacagtgactcgagaggctgaggcaggagaattgcttgaatccgggaggcggaatttgcagtgagctgagatcgcaccactgcactccagcctgggtgacagagccagattctatctcaaaaaaaaaaaaaaaaaaaaaaaaaggaactctaagtccttcatttctaagtcaagaagaggacatttctgtcatttcgggggtctcagattttgcagctcatttgaatttcacagtaaaatttaaaaggactggtgtctggatcccaggcaggatcatttgcatccatataatggagtttgctgaggtgctgagggagacatcagtaccttgaaattgccctacaggattaaatctgtaagctaattgtgtctttttttttttttttaatttgagacggagtcttgctctgtcgcccaggctggagtgcagtggcgcgatctcagctcactgcaagctctgtctcctgggttcacgccattctcctgcctcagcctcccgagtagctgggactacaggcccccaccaccacgcccagctaattttttttgtatttttcagtagagacggggtttcacagtgttagccaggacggtctcagctcctgacctcatgatcctcctgctttggcctcccaaagtgctgggattacaggcgtgagccaccgcacccggccctaattgtgtcttaaacttcctagtcccaggtccaaattggcaaaatagccagtatttctctgcatccccaaagatcaaaccaggaggatttacacaaggaaaagattgtgaaaaatcataagaaaaaactgagtagtcactgcagagaccaaggctgcagaaattgtattttttttatctgtttatctattaggtgttgggtgtttgtttgtttgttttgagacaaattctcactctcaccccagctggagtgcagtggcgtgatctcagatcactgcaacctccacctcccaggttcaagggattcatgtacctcagcctcccaagtagctgggattacaggtgcccaccaccatgcctggctaatttttgtatttttagtagcaacagggtttcatcatgttggccaggctggtctcaaactcctggcctcaaccaattcacctgcctcggcctctcaaagtgctgcgattagaggcgcgagccactgcacccaggtgtgtgggggttttgtttgtttgattgtttgtttgttttttgagacagagtctcgctctgttgctcaggctggagtgcagcggcgctatctcggctcactgcaagctccacctcccaggttcacgccattctcctgcctcagcctcccaagtagctgggactacaggtgccccccaccatacccggctattttttgtatttttagtagagacagggtttcaccgtgttagccaggatggtcttgatctcctgacctcgtgatccacccgccttggcctcccaaagtgctgggattacaggcgtgagccactgcgcccagcctgtgttgtttttaattgtatgtatttaaggcatacatgatgttttgatgcacgtatatgtagcgaaatgattactacaatgaagcaaaggaacatatccgtctcctgatgtaattacctttgtgtacgtgtgtgtagaaagagtagctgaaatctactctttcggcaaattcccagtatacaaggcggtattcctgaggttgttttatggggtggaagtttgccacagattggccataagcgggagtttatatctcagtctcttttcctcaattgttattgccatagaacttacatagagcaaagtgcaaaaaatcagacacatacatcttcacgaactttcacaaactgaacgcactcatgcccagcactgaaatcaatgaatagaatagcggattcatccccaggtgccttttcctgctaccccatcctgcctcccacaaaggcaccctctgttgtaacagcacctaggattagtttggctggtttttgtttcacgtgtagggaaccacatggtatgcactgtcttgggtttggattaacctcagctttgagagatcaaggcttaaggttgtgccggttgtcatttgtgagttctgattgctgtgagaagatccgatgggtgcagatgccccagtatttattcattctcctgctgttcattggctggtttctgacaagagctattatgactgcaggttctgtgccccgcagaacatgaaattggtgggcacgcatgtacaatgttgagataaatgctgtgtgcaagggaagagggtagacgtttatacggcttttggggtttgtttgagacggagtctcgatctgttgcccaggctggagtgtagtggcacgatctcggctcactgcaaccctcgcctcccaggttcaagcaattctcccacctcagcctcccaactagccgggattacaggcacccaccatcaggcctagctaatttttgtatttttgtggagatggtgtttcaccatgtttgcctggctggtcttgaattcctgatctcaggtgatctgcctgcctcggcctcccaaagtgctgggattacaagcttgagccaccgcctgtttgttcttttgagacagtctctctctcacccaggctggagtgcagtggcgcaatcttgtctcaccgcaacctccacctctgggttcaagcaattctcctgcatcagcctcccgagtagctgagactacaggcgtacgccaccatgcctggctaatttttttgtattttcaatagagaggaggtttcaccatgtcggccaggctggtctcaaactcctgacctcaagtaatccgcgcgcttcagcctcctaaagtgctgggattacaggcgtaagccactgtgcccagcctacagcttttgtttttgagacagggtcttgctctgtcacccaggctggagtgcagtagctcaatcacaactcactacagccttgatctcctgggctcaagtgatcctcccacttcagcctcctaagtagatgggactacaggcaggcatcaccatgcctgacaatgcttattttttattttttgtagagataaggtcttcctatgttgtccaagttgcttctagactactgagctcaagcgatcctcccacctctgcttcccaaaatgctgggattacaggcataaaccaccatgcctggccctatacagctttaatagatgtttgcatatagttttccaaagcggttattccaatttaaactcccactatccttacgggaaagactggtccctccataatctagtcagcacttggtgtttctgcgtttttccctttagctaagttgatatctatataatagtatctcattgtaatttttatttttttagcatttccctgaagctaaaagggttaaacatttgctcaaattttgctggtcatttaggccgggcgcggtagctcatgcctgtaatctcagcaatttgggaggccaaggcgggtggatcacttgaggtcaggagttcaagaccagcctgggcaacacggtaaaaccctgtttctactcaaaatacaaaaattagctggacgtggtggtgggagcctgtaatcccacctactcaggaggctgaggcaggagaatcgcttgaacccagaaggcagagttgcggcgagccaagatcgtgccactgcactccagcctgggtgacagaacaagactccacctgaaaattaataataataataatgatgataataattttttacggtcacttgtttatattcttttgtgtaggatccattcaagtttttcacccagtttcaagtgtgttttcattatttttctctgtttgtttgacattattctcttttttttaaatattaagattttttttatatatatactctggcttgatgtactttcctgggggtacaggatccaaacctcttcccccactccggttttccacgctttctctcttactgatgtatttgaatgaatagttgctcttaatgtatcttaatatggttcaaatttgaattttctcctttctatttagagtttcattgtatcaagaaggcagattatctcctcattgactgtgaagctgttcttctacctagtttttaattaaagctatttactgtgttttatacttagaactgaaactaagagtataagaaattaggccaggcacggtggctcacgcctgtaatcctagcactttgagaggccaaggcaggtgaatcacttgaggtcagtagttcgagaccaccctggccaacatggtgaaaccccgtctcgacaaaaaatacaaaaataagctgggtgtggtggcatgtgcctgtagtcccagctacttgggaggctgaagcaggagaatcattgaacccgggaggcagaggttgcagtgagctgagatcccgccactgctctccagcctgggtgacagagtgagaccccatctcgaaagaaaagagagaaaagaaaggaagacaggaaggaaggaagacaggaaggaaggaaggaaggaaggaaggaaggaaggaaaattaaaatgagactgaacctagaaaaaaggtagattagcaaagtggaacaaggttcaagagcaaatattcccaccaaagcatgaacaacattggaaacttcagagacaagtgggatgtgattaaaagaagagtagagagaacttggacaagaatggatatcagaagtgaaggatacatatgcaccttccaaaccaatgaaagacatcaacccacagatgcaattgactccacaccctctaggcaaaggaaatacacaggaagcaataatgagctacactgtggcctacaaaccaaccacaacgagaaagagtttagagaatgtggaaagcaaagaagcaaggaaaagcctgacagctgacatctcaacacaggtaaaatgagatagacatcagtggggcaccatttctaatatgctgaaagaaatttgtcaaaccagacacccgtacctgacagcaatattgcccccaaataaagatgcctaaataaaagtgtaaaggaaaacaattagttgttagcagcattgaattagaagaaaaatactagaatgaattctcaagtccacagggaaataatcccagattgaatgctagaaatgcagaaaggaacaaagatgaatgcacaagataagctgtaggtaaatattagtgcatattgctttatgaagcaatactagaaatgtctcctggagagtaaaatatgtgtagaattaatatgcatgagaatggtaatacaaaagtcagaaacagctaaaaagagaattaaaagtgttctaaagtattagcattttgtgggaggggttaaagtaattaattgtatcagagtatatgatttaattattagcataactacacagatttgtatggctgtaactagcaagttcatggagataacaataaaataataaacatatttaattcaaagtcagtcaagtaaaggcaaaaggaacgtgagtcagttaagtcaaaacctaggaaaaatgagatgattgaaacaatttcaaatttactggtaattatattaaatgtaaatgcacgaaatagaacttttttttttttttttttttgagatggagtctcactctgtcgcccatgctgagctgcagtggtgcgatctcggctcaccgcaacctctccctcccaggttcaagcgattctcctgcctcagcctcccgagtagctgggattacaggtgcatgccaccacaccagggtaagttttgtatttttagtagaaatggggtttcaccatgttggccaggctggtctcgaactcttgacctcaggtgatctacctgccttggtctcccaaagtgctgggattataggcgtaagccacctctcccggccaaagtagtaatttctttgcaacaactgtgtgatatattctataggattgtgaataaaagttttgggctttcttttcttaaagaacatttaaatggtctttagttgttgttattaaatcaaatattacgtgaacatttatgtacatagacaattccattcctatttctatagaaagtattcaaagatgtttggaaaactgggagaaaaagggaaacatatctaaaatgctgatattaactgtaaataccaccccgccacacacacatacacacgtattcaattctttctctactaacactctgtgtaggtaacaccacattggtttctgtataaagatttagaaatgcctcaaatccaatgggcggagacagggtgttccctgtggattatccactgattgcattatcactcgctttctctataaaaaggggaaccagatgcagaagtcactgcattttccggcaagccaagggttgtctgcatctcaagagtggggtcagcaagagaaactctacggctatgggagagcctgcgttcacctcttttccgagcccacctgttctggtgagtacgggatatttattgattacaggaatgtccatatgtgtcctttttccttctgtaagacagctttacagttagcagtgggttgttcttaaaactggatgttgtggaacgttatacctcaggtgttaatatctgttgaataatgttcaaagtattctcatttttgcccatgaaactgtatggggataatagctttgaattttttttaaaaatccaacatcactaggaaagggaagaagtatgatttggccttgcagtcttcaaattgtctccttctctggaaagctcctgaaccagaaattgcttggtccgtttttttaaaaaaacaaaaaacaaaaaaaattagttctctggtaaaatttcatgatgagttgcttattccctaaactcactgtcacgattcattgtagtgaatttcttttctgtttctctgtttctcctccttccatccctctctgtcactcccttcttcttcatcatggaacttacttatatctgatattccaccagaaatttgtttttagtgcgtttattatgtcttccttctcaccaagatgaaaatcaacagagtggtgatttatgaagtttacttctggatcaggggttctactgcacagcttggcacatcataagtgccccgtaactaaggggactaaataattttccctccaaaggggaacatcttgggtcagtattaatctttatgccaggggtactgtaaggggtagtattaatctttatgccaggacaacgaaaaatgaaatgaggaggacagaaacaaaggctttaaaatggaaagtgcactgatgaggtttgtgggggaaacagctttatgagactagagtcttccaattgagttagagcaagaaaggacgtcaaatcttaggaggcgcttgatcatctttctcagtatgtcatcaaaagattctctcatggtatacctctagttaattgagcttattagaaacagaaagcaacatggtgtttctgaggtttttcttcatgagcaggaggtgttcaggtgaaggtgggatctgggtgtggcagtgagtatttaaggtggcgagtgcaggatttctttggaaaccagagagtcaaggagctatgaaaatgacgttgtgtcctgaagcacagcagaaagagatacagagaagcgtgaggtcttggtgaacagggaagtctgggatcccggtgtcctgttggggatgggttaggaggcaccaccagcatctgtgtagctgacagtggcagggaagagaagagaggggtgtcctctgaggaggatgaggagggacaaggtctggaactgaccctgggtcatgaccttgagcatttagtccttgactcgcatcagcccgatgaggtcccaggacccagtgtcaatgcctggagctcctgccagcagcatcagggtcacacggagaaatgcagactctagggtccaccccagacttacttgggttcaggtccacatatctgactttagcaagccctgcaggggctgaggatgtacactgccatttgagacacatttccccagaaagagaggctggtgggaagattccactgagctgagagaagccccccacagctgatcttctcctgtctccagttggttgaaatttcacattttcttttcttttcttttgaaaggggaagctcaaaagaaacatgatgccctgggctttacagaagaaacgagaaatccacatggccaaggcccatcggagacgagctgcgaggtctgctctccccatgagactcaccagctgcatcttccggaggccggtgacaaggatcaggtctcatcctgacaaccaggtcagacgcagaaaaggggacgagcacctggagaagccgcagcaactctgcgcctaccggagactgcaggccctgcagccctgcagcagccaaggagaaggttcaagtccactgcatttggagagcgtcttaagtatccttgcaccggggacggccggtgaatctctggacagagctggtgctgagcgtgtgcgcatcccgcttgagcccacccctgggcggtttccagctgtggcaggggggccaaccccaggaatgggttgtcagctcccaccgcccctctctggccaattggtgactcctgcagatatccggagacaggccaggagggtgaagaaagccagggagagactggccaaggccttgcaggcagacaggctggccaggcaggcagaaatgctgacaggtgggtgaagctcagtcctgggctttcggtccctttcttttaatgcccatcctcattcctactctgaattgtcacacttttcccttccccaccagttctttaataaaagtatttgaaaggcaacaggtgtaaggagtggatgtttttgtggtgagaaattgggttttatgggatgaggaaggagacctttacatgtcactgtacatctcagtttctgtttaccatgattttaattaattgtttttttttgtttgtttgtttgttttgagacggagtcttgctctgttgcccaggctggagtgcaatggcgcgatctcggctcactgcaacctccacctcccgggttcaagtgattctcctgcctcagcttcccgagtagctgggattacaggtgcccaccaccatgcccggatattttttgtatttttagtagagatggggtttcaccatgctggccaggctggtcttgaactgctgacctcagcaatctgcccacctcggccttccaaagtactgggattacaggcataagccaccttgcctggccgttaattagtttttgtattaaattctaatttaatctttggcctggcgctgtggcttatgcctgtagtcccagcactttgggaggcggagcagggcagatcgtctgaggtcaggagttcaggaccagcctggccaatatggcgaaaccccatctctactaaaaataactaatcaggtgtgggggcggatgcctgtaatcccagctactggagaggctgaggcaagagaattggttgaaccaaggaggcagaggttgcagtgagccaaaatggtgccactgtactccagccttggtgaaactttgtctcaaaacaaaaattccaatttaattttcaaatgaagtcctttaaaaatgaaatgaaattctgtaattttaaatgaaacgaatacattacattataatttgttaaaaatgtattacattttcatttttaaattgagttttcattgtttgaaattttcgaattaggggaacatgtacatgtttgttacatggatatatcgcttaacggtgggggttgcttttgtagtttatgggttacccaaatactgaatatcgtacccagtagctaagttttcaacccatgggtaaactcaattaacctagcctgaaggattattcagtgtttagacattacattttctccctatagtatacgttctcaaggcgaagttggtacgtatcccaagattttttttttaatgaaacatttttaccccatttactctgatgtggttatcagacattttgtgcctgtatcaaaatatctcacgtaccacataaatatatacacatactacgtccctgcccgctgtttgactttgagtttccttacctctttatcattgatcgaaacatggaatggaatacctcatggtaattattttatgcatctcgggttaggtggaaactactggttgttttcactctagcagagttagggtggcaggaagtgcccatcagcagatgctactgcacaccagcccgggcgacagagcaagactctgtgtctaaaaatagatatataatttatatataattataaatacattatatataatttatacataattataaatacattatgtataataaaattatatactatataattatattatatactataatatatttcttatataattatattataatataatttatatgttatataattatattttatattataatataatgtatgttatataattatattttatattataatataatttatatgttatataattatattatatattataatacaatttatatgttatataattatatattataatataatttatatgttatataattatattatatattataatataatttatatgttatttaattatattataaattataatataatttatatagtatataattatacatattatatattaaaatataatttgtatattatataattatatatattaaaatataatttatatattatataattatatatattatgtattataattatatttatatattatatttatataattatatgtaatatatttaattatataatataattatataatatatacgtatattacataattatgatatataattatatataattatattatatatattatattattataatataatatatataatattatattatataattatatatattatatatatatattatatattataatattatatataatatatattatatatatattatattatatatatataatatattatattatatataataattataaaatataatatatattatattatataatatataattatacataactatattatatataatatataatataatataatatgaaataattttatataattatattatattatatatattatatattatatattacatattatatatattatatataatatatactatataatataataaaatatatattatacataatatataatataataatatataattatatataatatatataatatactataatataattatatataattatatataatacagttatgtataattatatattatataatataatatatattatattatataattataatatatataattatatataattatataatataccgatatagtatatattatacaattatattatataattatataaatatgatatataaatataattataatatataatatataattacataatatataaattatatattaatatataatatatgtaagtatataatatataaattatattatatatataatataattatataacatataaattatattatatatataatataattatataacatataaattatattatatatataatataattatataacatataaattatattatatatataatataattatataacatataaattatattatatataatataattctataacatataaattatattatatataatataattatataacatataaattatattatatataatataattatataacatataaattatattatatataatataattatataacatataaattatattatatataaaatataattatataacatataaattatattataatataaaatataattatatcacgtataaattatattataatataattatataagaaatatattatagtatataatataattatatagtatataattgtattatacataatgtatttataattatgtataaattatatataatgtatttataattatatataaattatatataatgtatttataattatatataaattatatataatgtatttataattatatataaattatatatttatttttagacacagagtcttgctctgtcgcccgggctggtgtgcagtagcatctgctgatgggcacttcctgccaccctaactctgctagagtgaaaacaaccagtagtttccacctaacccgagatgcataaaataattaccatgaagtattccattccatgtttcgatcaatgataaagaggtaaggaaactcaaagtcaaacagcgggcagggacgtagtatgtgtatatatttatgtggtatgtgagatattttgatacaggcacaaaatgtctgataaccacatcagagtaaatggggtaaaaatgtttcattaaaaaaaaaatcttgggatacgtaccaacttcgccttgagaacgtatactatagggagaaaatgtaatctctaaacactgaataatccttcaggctaggttaattgagtttacccatgggttgaaaacttagctactgggtacgatgattagtatttgggtaacccataaactacaaaaccaacccccaccgttaagcgatatatccatgtaacaaacatgtacacatgtacccctaaatcgaaaatttcaaacaatgaaaactcaatttaaaaatgaaaatgtaatacatttttaacaaattataatgtaatgtattcgtttcatttaaaattacagaatttcatttcatttttaaaggatttcatttgaaaattaaattggaatttttgttttgagacaaagtttcaccaaggctggagtacagtggcaccattttggctcactgcaacctctgcctccttggttcaaccgattctcttgcctcagcctctccagtagctgggattacagacatccgcccccacacctgattagttatttttagtagagatggggtttcgccatattggccaggctggtcctgaactcctgacctcagacgatctgccctgctccgcctcccaaagtgctgggactacaggcataagccacagcgccaggccaaagattaaattagaatttaatacaaaaactaattaacagccgggcaaggtggcttatgcctgtaatcccagtactttggaaggccgaggtgggcagattgctgaggtcagcagttcaagaccagcctggccagcctggtgaaaccccatctctactaaaaatgcaaaaaatatccgggcatggtggtgggcacctgtaatcccagctactcgggaagctgaggcaggagaatcacttgaacccgggaggtggaggttgcagtgagccgagatcgcgccattgcactccagcctgggcaacagagcaagactccgtctcaaaacaaacaaacaaacaaaaaaaaacaattaattaaaatcatggtaaacagaaactgagatgtacagtgacatgtaaaggtctccttcctcatcccataaaacccaatttctcaccacaaaaccatccactccttacacctgttgcctttcaaatacttttattaaagaactggtggggaagggaaaagtgtgacaattcagagtaggaatgaggatgggcattaaaagaaagggaccgaaagcccaggactgcgcttcatctacatgtcagcatttctgcctgcctggccagcctgtctgcctgcaaggccttggccagtctctccctggctttcttcaccctcctggcctgtctccggatatctgcaggagtcaccaattggccagagaggggcggtgggagctgacaacccattcctggggttggcccccctgccacagctggaaaccgcccaggggtgggctcaagcgggatgcgcacacgctcagcaccagctctgtccagagattcaccggccgtccccggtgcaaggatacttaagacgctctccaaatgcagtggacttgaaccttctccttggctgctgcagggctgcagggcctgcagtctccggtaggcgcagagttgctgcggcttctccaggtgctcgtccccttttctgcgtctgacctggttgtcaggatgagacctgatccttgtcaccggcctccggaagatgcagctggtgagtctcatggggagagcagacctcgcagctcgtctccgatgggccttggccatgtggatttctcgtttcttctgtaaagcccagggcatcatgtttcttttgagcttcccctttcaaaagaaaagaaaagaaaatgtgaaatttcaaccaattggagacaggagaagatcagctgtggggggcttctctcagctcagtggaatcttcccaccagcctctctttctggggaaatgtgtctcaaatggcagtgtacatcctcagcccctgcagggcttgctaaagtcagatatgtggacctgaacccaagtaagtctggggtggaccctagagtctgcatttctccgtgtgaccctgatgctgctggcaggagctccaggcattgacactgggtcctgggacctcatcgggctgatgcgagtcaaggactaaatgctcaaggtcatgacccagggtcagttccagaccttgtccctcctcatcctcctcagaggacacccctctcttctcttccctgccactgtcagctacacagatgctggtggtgcctcctaacccatccccaacaggacaccgggatcccagacttccctgttcaccaagacctcacgcttctctgtatctctttctgctgtgcttcaggacacaacgtcattttcatagctccttgactctctggtttccaaagaaatcctgcactcgccaccttaaatactcactgccacacccagatcccaccttcacctgaacacctcctgctcatgaagaaaaacctcagaaacaccatgttgctttctgtttctaataagctcaattaactagaggtataccatgagagaatcttttgatgacatactgagaaagatgatcaagcgcctcctaagatttgacgtcctttcttgctctaactcaattggaagactctagtctcataaagctgtttcccccacaaacctcatcagtgcactttccattttaaagcctttgtttctgtcctcctcatttcatttttcgttgtcctggcataaagattaatactaccccttacagtacccctggcataaagattaatactgacccaagatgttcccctttggagggaaaattatttagtccccttagttacggggcacttatgatgtgccaagctgtgcagtagaacccctgatccagaagtaaacttcataaatcaccactctgttgattttcatcttggtgagaaggaagacataataaacgcactaaaaacaaatttctggtggaatatcagatataagtaagttccatgatgaagaagaagggagtgacagagagggatggaaggaggagaaacagagaaacagaaaagaaattcactacaatgaatcgtgacagtgagtttagggaataagcaactcatcatgaaattttaccagagaactaattttttttgttttttgtttttttaaaaaaacggaccaagcaatttctggttcaggagctttccagagaaggagacaatttgaagactgcaaggccaaatcatacttcttccctttcctagtgatgttggatttttaaaaaaaaattcaaagctattatccccatacagtttcatgggcaaaaatgagaatactttgaacattattcaacagatattaccacctgaggtatcactttccacaacatccagttttaagaacaacccactgctaactgtaaagctgtcttacagaaggaaaaaggacacatatggacattcctgtaatcaataaatatcccgtactcaccagaacaggtgggctcggaaaagaggtgaacgcaggctctcccatagccgtagagtttctcttgctgaccccactcttgagatgcagacaacccttggcttgccggaaaatgcagtgacttctgcatctggttcccctttttatagagaaagcgagtgataatgcaatcagtggataatccacagggaacaccctgtctccgcccattggatttgaggcatttctaaatctttatacagaaaccaatgtggtgttacctacacagagtgttagtagagaaagaattgaatacgtgtgtatgtgtgtgtggcggggtggtatttacagttaatatcagcattttagatatgtttccctttttctcccagttttccaaacatctttgaatactttctatagaaataggaatggaattgtctatgtacataaatgttcacgtaatatttgatttaataacaacaactaaagaccatttaaatgttctttaagaaaagaaagcccaaaacttttattcacaatcctatagaatatatcacacagttgttgcaaagaaattactactttggccgggagaggtggcttacgcctataatcccagcactttgggagaccaaggcaggtagatcacctgaggtcaagagttcgagaccagcctggccaacatggtgaaaccccatttctactaaaaatacaaaacttaccctggtgtggtggcatgcacctgtaatcccagctactcgggaggctgaggcaggagaatcgcttgaacctgggagggagaggttgcggtgagccgagatcgcaccactgcagctcagcatgggcgacagagtgagactccatctcaaaaaaaaaaaaaaaaaaaagttctatttcgtgcatttacatttaatataattaccagtaaatttgaaattgtttcaatcatctcatttttcctaggttttgacttaactgactcacgttccttttgcctttacttgactgactttgaattaaatatgtttattattttattgttatctccatgaacttgctagttacagccatacaaatctgtgtagttatgctaataattaaatcatatactctgatacaattaattactttaacccctcccacaaaatgctaatactttagaacacttttaattctctttttagctgtttctgacttttgtattaccattctcatgcatattaattctacacatattttactctccaggagacatttctagtattgcttcataaagcaatatgcactaatatttacctacagcttatcttgtgcattcatctttgttcctttctgcatttctagcattcaatctgggattatttccctgtggacttgagaattcattctagtatttttcttctaattcaatgctgctaacaactaattgttttcctttacacttttatttaggcatctttatttgggggcaatattgctgtcaggtacgggtgtctggtttgacaaatttctttcagcatattagaaatggtgccccactgatgtctatctcattttacctgtgttgagatgtcagctgtcaggcttttccttgcttctttgctttccacattctctaaactctttctcgttgtggttggtttgtaggccacagtgtagctcattattgcttcctgtgtatttcctttgcctagagggtgtggagtcaattgcatctgtgggttgatgtctttcattggtttggaaggtgcatatgtatccttcacttctgatatccattcttgtccaagttctctctactcttcttttaatcacatcccacttgtctctgaagtttccaatgttgttcatgctttggtgggaatatttgctcttgaaccttgttccactttgctaatctaccttttttctaggttcagtctcattttaattttccttccttccttccttccttccttccttccttccttccttccttcctgtcttccttccttcctgtcttcctttcttttctctcttttctttcgagatggggtctcactctgtcacccaggctggagagcagtggcgggatctcagctcactgcaacctctgcctcccgggttcaatgattctcctgcttcagcctcccaagtagctgggactacaggcacatgccaccacacccagcttatttttgtattttttgtcgagacggggtttcaccatgttggccagggtggtctcgaactactgacctcaagtgattcacctgccttggcctctcaaagtgctaggattacaggcgtgagccaccgtgcctggcctaatttcttatactcttagtttcagttctaagtataaaacacagtaaatagctttaattaaaaactaggtagaagaacagcttcacagtcaatgaggagataatctgccttcttgatacaatgaaactctaaatagaaaggagaaaattcaaatttgaaccatattaagatacattaagagcaactattcattcaaatacatcagtaagagagaaagcgtggaaaaccggagtgggggaagaggtttggatcctgtacccccaggaaagtacatcaagccagagtatatatataaaaaaaatcttaatatttaaaaaaaagagaataatgtcaaacaaacagagaaaaataatgaaaacacacttgaaactgggtgaaaaacttgaatggatcctacacaaaagaatataaacaagtgaccgtaaaaaattattatcatcattattattattattaattttcaggtggagtcttgttctgtcacccaggctggagtgcagtggcacgatcttggctcgccgcaactctgccttctgggttcaagcgattctcctgcctcagcctcctgagtaggtgggattacaggctcccaccaccacgtccagctaatttttgtattttgagtagaaacagggttttaccgtgttgcccaggctggtcttgaactcctgacctcaagtgatccacccgccttggcctcccaaattgctgagattacaggcatgagctaccgcgcccggcctaaatgaccagcaaaatttgagcaaatgtttaacccttttagcttcagggaaatgctaaaaaaataaaaattacaatgagatactattatatagatatcaacttagctaaagggaaaaacgcagaaacaccaagtgctgactagattatggagggaccagtctttcccgtaaggatagtgggagtttaaattggaataaccgctttggaaaactatatgcaaacatctattaaagctgtatagggccaggcatggtggtttatgcctgtaatcccagcattttgggaagcagaggtgggaggatcgcttgagctcagtagtctagaagcaacttggacaacataggaagaccttatctctacaaaaaataaaaaataagcattgtcaggcatggtgatgcctgcctgtagtcccatctacttaggaggctgaagtgggaggatcacttgagcccaggagatcaaggctgtagtgagttgtgattgagctactgcactccagcctgggtgacagagcaagaccctgtctcaaaaacaaaagctgtaggctgggcacagtggcttacgcctgtaatcccagcactttaggaggctgaagcgcgcggattacttgaggtcaggagtttgagaccagcctggccgacatggtgaaacctcctctctattgaaaatacaaaaaaattagccaggcatggtggcgtacgcctgtagtctcagctactcgggaggctgatgcaggagaattgcttgaacccagaggtggaggttgcggtgagacaagattgcgccactgcactccagcctgggtgagagagagactgtctcaaaagaacaaacaggcggtggctcaagcttgtaatcccagcactttgggaggccgaggcaggcagatcacctgagatcaggaattcaagaccagccaggcaaacatggtgaaacaccatctccacaaaaatacaaaaattagctaggcctgatggtgggtgcctgtaatcccggctagttgggaggctgaggtgggagaattgcttgaacctgggaggcgagggttgcagtgagccgagatcgtgccactacactccagcctgggcaacagatcgagactccgtctcaaacaaaccccaaaagccgtataaacgtctaccctcttcccttgcacacagcatttatctcaacattgtacatgcgtgcccaccaatttcatgttctgcggggcacagaacctgcagtcataatagctcttgtcagaaaccagccaatgaacagcaggagaatgaataaatactggggcatctgcacccatcggatcttctcacagcaatcagaactcacaaatgacaaccggcacaaccttaagccttgatctctcaaagctgaggttaatccaaacccaagacagtgcataccatgtggttccctacacgtgaaacaaaaaccagccaaactaatcctaggtgctgttacaacagagggtgcctttgtgggaggcaggatggggtagcaggaaaaggcacctggggatgaatccgctattctattcattgatttcagtgctgggcatgagtgcgttcagtttgtgaaagttcgtgaagatgtatgtgtctgattttttgcactttgctctatgtaagttctatggcaataacaattgaggaaaagagactgagatataaactcccgcttatggccaatctgtggcaaacttccaccccataaaacaacctcaggaataccgccttgtatactgggaatttgccgaaagagtagatttcagctactctttctacacacacgtacacaaaggtaattacatcaggagacggatatgttcctttgcttcattgtagtaatcatttcgctacatatacgtgcatcaaaacatcatgtatgccttaaatacatacaattaaaaacaacacaggctgggcgcagtggctcacgcctgtaatcccagcactttgggaggccaaggcgggtggatcacgaggtcaggagatcaagaccatcctggctaacacggtgaaaccctgtctttactaaaaatacaaaaaatagccgggtatggtggggggcacctgtagtcccagctacttgggaggctgaggcaggagaatggcgtgaacctgggaggtggagcttgcagtgagccgagatagcgccgctgcactccagcctgagcaacagagcgaaactctgtctcaaaaaacaaacaaacaatcaaacaaacaaaacccccacacacctgggtgcagtggctcgcgcctctaatcgcagcactttgagaggccgaggcaggtgaattggttgaggccaggagtttgagaccagcctggccaacatgatgaaaccctgttgctactaaaaatacaaaaattagccaggcatggtggtgggcacctgtaatcccagctacttgggaggctgaggtacatgaatcccttgaacctgggaggtggaggttgcagtgatctgagatcacgccactgcactccagctggggtgagagtgagaatttgtctcaaaacaaacaaacaaacacccaacacctaatagataaacagataaaaaaaatacaatttctgcagccttggtctctgcagtgactactcagttttttcttatgatttttcacaatcttttccttgtgtaaatcctcctggtttgatctttggggatgcagagaaatactggctattttgccaatttggacctgggactaggaagtttaagacacaattagggccgggtgcggtggctcacgcctgtaatcccagcactttgggaggccaaagcaggaggatcatgaggtcaggagctgagaccgtcctggctaacactgtgaaaccccgtctctactgaaaaatacaaaaaaaattagctgggcgtggtggtgggggcctgtagtcccagctactcgggaggctgaggcaggagaatggcgtgaacccaggagacagagcttgcagtgagctgagatcgcgccactgcactccagcctgggcgacagagcaagactccgtctcaaattaaaaaaaaaaaaaaaagacacaattagcttacagatttaatcctgtagggcaatttcaaggtactgatgtctccctcagcacctcagcaaactccattatatggatgcaaatgatcctgcctgggatccagacaccagtccttttaaattttactgtgaaattcaaatgagctgcaaaatctgagacccccgaaatgacagaaatgtcctcttcttgacttagaaatgaaggacttagagttcctttttttttttttttttttttttttgcgatagaatctggctctgtcacccaggctggagtgcagtggtgcgatctcagctcactgcaaattccgcctcccggattcaagcaattctcctgcctcagcctctcgagtcactgttattacaggtgcccaccaccaagcctagctaacttttgtattttttttttttttcgaaacagagtcttgctctgtcgtgcaggctggagtgcactggtgcgatcttggctcactgcaacctctgccccctgggttcaagcaattatcctgcctcagcctcctgagtagctgggattacaggcacctgccaccacgcccagctaatttttgtatttttagtagcgatgaggtttcaccatgttggccaggctggtcttaaactcctgacctcaagtgatccaaccacctcggcctcctaaagtgctaggattacaggcgtgagccaccacacccggcctaatttttgtatttttagtagagatggggtttcaccaagttggccaggctggtcacaaactcctgacctcaaatgatctgtccgcctcggcctcccagagtgctgggataacaggtgtaaaccaccctgccctggcaggacttggagttcttaaaaataataataacaataaattctgtttgggaggctgaggtgggcagatcacttgaggtcaggacaagaccagcctggccaacatgatgaaaccctgactctaccaagaatacaaaaattagctgggcgtggctgggcgtggtggctcatgcctgtcatcccagcactttgggaggctgaggcaggtggatcacctgaggtcgggagtttgagaccagcctggccgacgtggtgatacctcgtctctactaaaaaaaatacaaaaaatagccggatgtggtggcaggcgcctgtaatcccagctacttggaacttggaaggctgaggcaggagaactgcttgaacctggcaggtggaggttgcagtgagccgagatcacgtcattgcactccagcctgggcaacagagcaagactctgtctccaagaaaaaaaaattagctgggcgtggtgtcttgggcctgtaaacccagctacttgggaggctgaggcaggagaattgcttaaacccgggaggtggaggttgcagtgagccgagatcacgtcattgcactccagcctgggcaacagagggagactctaaataaataaataaataaataaatgatttctgatttcctggcccctcccgtaggcatccggagacactggtctggaaggcacccaggtgtgaaaacactcccaggtgtgttttctgcaaaccaaagttcaaaaccacagactccaaaccaaccagggaagtggtgtgtcatccttggctgtccttttggtctttaggggattgtaaaattcctatagcctaggctgcatccaacatcagtggaataaaaatgtgtaggggtgtgtgctaccattagtttttcaaactctccaggagattccaatgtacgttcaggttgggatacaaataaagtacatttcttcccatttaaactctcactggctacacgtgaatggtatgattgctccatagccatgtctgcacttggcattgctattttttcattttagccaaacagaagtgtatatgagtatctcatagtgatttttcatcagcgtttatctgaagctaaacagaatttgggcatgtgttcaggattgtattgaccatttatttattctctcttcaatagtgcctactgaagttttccactcattttgcacatcaatttttagtattttttttcatttgatggacatctttctagtctgtattctggcttgatgtactttactggatgcacatcatgcaaatatcttttccaatatgattttctaacacccatttctctctgcattttcattaataggagatctttctttttttttttttagatggagtctcactctgtcgcccaggctagagcgcggtatattgtgtctatatattggagtttgcaggggaggcatcggtgcattgaaattgccacaatgtgattaaatacgtaagctaattgtgtcttaaacttcctagccccaggtccaaattggtaaaatagccagcatctgtctgcctcctcaaagatcaaaccaggaagatttatacaatgaaaacatcatgaaaaataataggaaaaaactgagtagtcactgcatagaccaaggctgctgagactgtatttcttttttattaggtctgtttatttattaggtgtttttctttttgtttcttctctctttttttttttttttttttttttttttttttgagatggagtctcactctgtcgcccaggctggagtgtagtggcactatctcggctcactgcaacctttgcctcccaagttcacaccattctcctgcctcagcctcccgggtagctgggattacaggcatgcaccatcatgcccagttaattttgtatttttagtagagacggggtttctccatgttgaggctggtctcgaactcctgacctcaggtgatccgcccgactcggcctctcaaagtgctgggattacaggattgagccaccgcacccggccgacaattccattcttatttccgtagaatgctttcaaagatgtttgagagaatgggaggaaaaggaaacatatctaaaatgccgatattaactgtaaataccaccccgccacacacacggattaaattctttttctactgacattctgtgttggtaacaccatattggtttctgtataaagatttagaaatgcttcaaatccaatgggtggagacagggcgttccctatggattatccactgattgcattatcactccctctataaaagaggagctagatgcagaagccactgcattttccggcaagccaagggctgtctgtgcctcaggagtggggtcagcaggaggaactctacagctatgggagaacctgcgttcacctcttttccaagcctgcctgttctggtgagtatgggatccttattgactattgaccaaaataatgtccatttgtattcctttttctttctgtaaaacatcttcacagtttagcaagttgttctcaaaactagatgctatctcgtggaaacttataccctaggtgttaatatttgttgagtaatactcaagtaatattcaaaatattcaacaatattctaattttttgttcacggagctatctggggataatagccctgattttttaaaagtccaacaacatcactaagaaggaaaagaggtattacttggccttgcagtcttcaaattgtctctctctctggaaagttcttgaaccagaaattgcttggtccctttaaaaaaaaattttagttctctggttaaatatcatgattggttagtccttccctaaactcactgtcatgattcattgtagtgaatttctttcttttctgtttctctgtttctcctccctccatccctctctgtctctcccttcttcttcatcatggaacttaattatatctgataccctatcggaaatttgtttttagtgtgtttattatgtcttccttctcaccaagatgaaaatcaacagagtggtgatttctgcagtttacttctggatcaggggttctactgcacagcttggcacatcataagtgccctgtaactaaggagactaaataattttccctccaaaggggaacaccttgggtcgtgtaaggggtagtattaatcttaatgccaggacaacagaaatgaaatgagaaggacagaaatgaaggctttatgtttgtatctgaaacagctttatgagactagagtcttccaattgatttagagcaagaaaggatttcaaatcttaggaggggcttaatcatctttctcagtatgtcatcaaaagattctctcatggtgtaactctagttaattgagcttattagaaacagaaagcaacatggtgtttctgaggtttttcttcatgagcaggaggtgttcaggtgaaggtgggatctgggtgtggcagtgagtatttaaggtggcgagtgcaggatttctttggaaaccagagagtcaaggagctatgaaaatgacgttgtgtcctgaagcacagcagaaagagatacagagaagcgtgaggtcttggtgaacagggaagtctgggatcccggtgtcctgttggggatgggttaggaggcaccagcatctgtgtagctgacagtggcagggaagagaagagaggggtgtcctctgaggaggatgaggagggacaaggtctggaactgaccctgggtcatgaccttgagcatttagtccttgactcgcatcagcccgatgaggtcccaggacccagtgtcaatgcctggagctcctgccagcagcatcagggtcacacggagaaatgcagactctaggttccaccccagacttacttgggttcaggtccacatatctgacttcagcaaaccctgcaggtgctgaggatgtacactgccatttgagacacatttccccagaaagagaggctggtgggaagattccactgagctgagagaagccccccacagctgatcttctcctgtctccatttggttgaaatttcacattttcttttcttttgaaaggggaagctcaaaaggaacatgatgccctgggctttacagaagaaacgagaaatccacatggccaaggcccatcggagacgagctgcgaggtctgctctccccatgagactcaccagctgcatcttccggaggccggtgacaaggatcaggtctcatcctgacaaccaggtcagacgcagaaaaggggacgagcacctggagaagccgcagcaactctgcgcctaccggagactgcaggccctgcagccctgcagcagccaaggagaaggttcaagtccactgcatttggagagcgtcttaagtatccttgcaccggggacggccggtgaatctctggacagagctggtgctgagcgtgtgcgcagcccgcttgagcccacccctgggcggtttccagctgtggcaggggggccaaccccaggaatgggttgtcagctcccaccgcccctctctggccaattggtgactcctgcagatatccggagacaggccaggagggtgaagaaagccagggagagactggccaaggccttgcaggcagacaggctggccaggcgggcagaaatgctgacaggtggatgaagctcagtcttgggctttcggtccctttcttttaatgcccatcctcattcctactctgaattgtcacacttttcccttccccaccagttctttaataaaagtatttgaaaggcaacaggtgtaaggagtggatgtttttgtggtgagaaattgggttttatgggatgaggaaggagacctttacatgtcactgtacatctcagtttctgtttaccatgattttaattaattgtttttgtttgtttgtttgtttgtttgttttgagacggagtcttgctctgttgcccaggctggagtgcaatggcgcgctctcggctcactgcaacctccacctcccgggttcaagtgattctcctgcctcagcttcccgagtagctgggattacaggtgcccaccaccatgcccggatattttttgcatttttagtagagatggggtttcaccaggctggccaggctggtcttgaactgctgacctcagcaatctgcccacctcggccttccaaagtactgggattacaggcataagccaccttgcccggctgttaattagtttttgtattaaattctaatttaatctttggcctggcgctgtggcttatgcctgtagtcccagcactttgggaggcggagcagggcagatcgtctgaggtcaggagttcaggaccagcctggccaatatggcgaaaccccatctctactaaaaataactaatcaggtgtgggggcggatgcctgtaatcccagctactggagaggctgaggcaagagaatcggttgaaccaaggaggcagaggttgcagtgagccaaaatggtgccactgtactccagccttggtgaaactttatctcaaaacaaaaattctaatttaattttcaaatgaaatcctttaaaaatgaaattctgtaattttaaatgaaacgaatacattacattataatttgttaaaaatgtattacattttcatttttaaattgagttttcattgtttgaaattttcgatttaggggtacatgtgtacatgtttgttacatggatatatcgcttaacggtgggggttggttttgtagtttatgggttacccaaatactaaacatcgtacccagtagctaagttttcaacccatgggtaaattcaattaacctagcctgaaggattattcagtgtttagacattacattttctccctataatatacattctcaaggcgaagttggtacgtatcccaagattttttttttaatgaaacatttttaccccatttactctgatgtggttatcagacattttgtgcctgtatcaaaatatctcacgtaccacataaatatatacacatactacgtccctgcccgctgtttgactttgagtttccttacctctttctctttatcgttgatcaaaacatggaatggaatacttcatggtaattattttatgcatctcgggttaggtggaaactactggttgttttcactctagcagagttagggtggcaggaagtgcctatcagcagatgctactgcacaccagcccgggcgacagagcaagactctgtgtctaaaaataaatatataatttatatataattataaatacattatatataatttatatataattataaatacattatatataatttctatataattataaatacattacacataatgtatacataattataaatacattatgtataatacaattatatactatataattatattatatactataatatatttcttatataattatattataatataatttatatgttatataattatattttatattataatataatttatatgctatataattatattatatattataatataatttatatgttatataattatattatatataatataatttatatgttatataattatattatatatataatataatttatatgttatataattatattatatatataatataatttatatgttatataattatattatatatataatataatttatatgttatataattatattatatattataatataatttatatattatatacttacatatattatatattaaaatataatttatatattatgtaattatatattatatattataattatatttatatatcatatttatataattatataatataattgtataatatatactatataggtatattatataattatatataattatatatattataattatataatataatatatattatattatataatatataattatacataactgtattaaatataataatatataattatatataatatatataatatactataatataattatatataattatattatatattatgtataatatataatttatattatatagtatatataatatatataatatataatatgtaatatataatatataatatatataatatgtaatatataatatataatatatataatataatataattatataaaattatatcatattgtattataattatatattatatataatatagttatgtataattatatattatataatataatatatattatattatataattaatatatataattatatataataattagatacctatatattatataattatattatataattaataaatatattacatataattatataaatataatatataaatataattataatacataatatatataattatataatatataaattatattttaatatatataattatataatatacaaattataatttaatatataatatgtataattatatactatataaattatattataatttataatataattatataacatataaattatattataatataaaatataattatataacatataaattatattataatatataatataattatataacatataaattgtattataatatataatataattatataacatataaattatattataatataaaatataattatataacatataaattatattataatataattatataagaaatatattacagtatataatataattatatagtatataattttattatacataatgtatttataattatgtataaattatatataatgtatttataattatatataaattatatatttatttttagacacagagtcttgctctgtcgcccgggctggtgtgcagtagcatctgctgatgggcacttcctgccaccctaactctgctagagtgaaaacaaccagtagtttccacctaacccgagatgcataaaataattaccatgaagtattccattccatgtttcgatcaatgataaagacgtaaggaaactcaaagtcaaacagcgggcagggacgtagtatgtgtatatatttatgtggtacgtgagatattttgatacaggcacaaaatgtctgataaccacatcagagttaatggggtaaaaatgtttcattaaaaaaaaaatcttgggatacgtaccaacttcgccttgagaatgtatactatagggagaaaatgtaatgtctaaacactgaataatccttcaggctaggttaattgagtttacccatgggttgaaaacttagctactgggtacgatattcagtatttgggtaacccataaactacaaaaccaacccccaccgttaagcgatatatccatgtaacaaacatgtacatgttcccctaattcgaaaatttcaaacaatgaaaactcaatttaaaaatgaaaatgtaatacatttttaacaaattataatgtaatgtattcgtttcatttaaaattacagaatttcatttcatttttaaaggatttcatttgaaaattaaattggaatttttgttttgagacaaagtttcaccaaggctggagtacagtggcaccattttggctcactgcaacctctgcctccttggttcaaccgattctcttgcctcagcctctccagtagctgggattacaggcatccgcccccacacctgattagttatttttagtagagatggggtttcgccatattggccaggctggtcctgaactcctgacctcagacgatctgccctgctccgcctcccaaagtgctgggactacaggcataagccacagcgccaggccaaagattaaattagaatttaatacaaaaactaattaacggccaggcaacgtggcttatgcctgtaatcccagtactttggaaggccgaggtgggcagattgctgaggtcagcagttcaagaccagcctggccagcatggtgaaaccccatctcaactaaaaatacaaaaaatatccgggcatggtggtgggcacctgtaatcccagctactcgggacgctgaggcaggagaatcacttgaacccgggaggtggaggttgcagtgagccgagatcgcgccattgcactccagcctgggcaacagagcaagactccgtctcaaaacaaacaaacaaacaaaaaaaacaattaattaaaatcatggtaaacagaaactgagatgtacagtgacatgtaaaggtctccttcctcatcccataaaacccaatttctcaccacaaaaccatccactccttacacctgttgcctttcaaatacttttattaaagaactggtggggaagggaaaagtgtgacaattcagagtaggaatgaggatgggcattaaaagaaagggaccgaaagcccaggactgcgcttcatctacatgtcagcatttctgcctgcctggccagcctgtctgcctgcaaggccttggccagtctctccctggctttcttcaccctcctggcctgtctccggatatctgcaggagtcaccaattggccagagaggggcggtgggagctgacaacccattcctggggttggcccccctgccacagctggaaaccgcccaggggtgggctcaagcgggctgcgcacacgctcagcaccagccctgtccagagattcaccggccgtccccggtgcaaggatacttaagacgctctccaaatgcagtggacttgaaccttctccttggctgctgcagggctgcagggcctgcagtctccggtaggcgcagagttgctgcggcttctccaggtgctcgtccccttttctgcgtctgacctggttgtcaggatgagacctgatccttgtcaccggcctccggaagatgcagctggtgagtctcatggggagagcagacctcgcagctcgtctccgatgggccttggccatgtggatttctcgtttcttctgtaaagcccagggcatcatgtttcttttgagcttcccctttcaaaagaaaagaaaagaaaatgtgaaatttcaaccaattggagacaggagaagatcagctgtggggggcttctctcagctcagtggaatcttcccaccagcctctctttctggggaaatgtgtctcaaatggcagtgtacatcctcagcccctgcagggcttgctaaagtcagatatgtggacctgaacccaagtaagtctggggtggaccctagagtctgcatttctccgtgtgaccctgatgctgctggcaggagctccaggcattgacactgggtcctgggacctcatcgggctgatgcgagtcaaggactaaatgctcaaggtcatgacccagggtcagttccagaccttgtccctcctcatcctcctcagaggacacccctctcttctcttccctgccactgtcagctacacagatgctggtggtgcctcctaacccatccccaacaggacaccgggatcccagacttccctgttcaccaagacctcacgcttctctgtatctctttctgctgtgcttcaggacacaacgtcattttcatagctccttgactctctggtttccaaagaaatcctgcactcgccaccttaaatactcactgccacacccagatcccaccttcacctgaacacctcctgctcatgaagaaaaacctcagaaacaccatgttgctttctgtttctaataagctcaattaactagaggtataccatgagagaatcttttgatgacatactgagaaagatgatcaagcgcctcctaagatttgacgtcctttcttgctctaactcaattggaagactctagtctcataaagctgtttcccccacaaacctcatcagtgcactttccattttaaagcctttgtttctgtcctcctcatttcatttttcgttgtcctggcataaagattaatactaccccttacagtacccctggcataaagattaatactgacccaagatgttcccctttggagggaaaattatttagtccccttagttacggggcacttatgatgtgccaagctgtgcagtagaacccctgatccagaagtaaacttcataaatcaccactctgttgattttcatcttggtgagaaggaagacataataaacgcactaaaaacaaatttctggtggaatatcagatataagtaagttccatgatgaagaagaagggagtgacagagagggatggaaggaggagaaacagagaaacagaaaagaaattcactacaatgaatcgtgacagtgagtttagggaataagcaactcatcatgaaattttaccagagaactaattttttttgttttttgtttttttaaaaaaacggaccaagcaatttctggttcaggagctttccagagaaggagacaatttgaagactgcaaggccaaatcatacttcttccctttcctagtgatgttggatttttaaaaaaaaattcaaagctattatccccatacagtttcatgggcaaaaatgagaatactttgaacattattcaacagatattaccacctgaggtataactttccacaacatccagttttaagaacaacccactgctaactgtaaagctgtcttacagaaggaaaaaggacacatatggacattcctgtaatcaataaatatcccgtactcaccagaacaggtgggctcggaaaagaggtgaacgcaggctctcccatagccgtagagtttctcttgctgaccccactcttgagatgcagacaacccttggcttgccggaaaatgcagtgacttctgcatctggttcccctttttatagagaaagcgagtgataatgcaatcagtggataatccacagggaacaccctgtctccgcccattggatttgaggcatttctaaatctttatacagaaaccaatgtggtgttacctacacagagtgttagtagagaaagaattgaatacgtgtgtatgtgtgtgtggcggggtggtatttacagttaatatcagcattttagatatgtttccctttttctcccagttttccaaacatctttgaatactttctatagaaataggaatggaattgtctatgtacataaatgttcacgtaatatttgatttaataacaacaactaaagaccatttaaatgttctttaagaaaagaaagcccaaaacttttattcacaatcctatagaatatatcacacagttgttgcaaagaaattactactttggccgggagaggtggcttacgcctataatcccagcactttgggagaccaaggcaggtagatcacctgaggtcaagagttcgagaccagcctggccaacatggtgaaaccccatttctactaaaaatacaaaacttaccctggtgtggtggcatgcacctgtaatcccagctactcgggaggctgaggcaggagaatcgcttgaacctgggagggagaggttgcggtgagccgagatcgcaccactgcagctcagcatgggcgacagagtgagactccatctcaaaaaaaaaaaaaaaaaaaagttctatttcgtgcatttacatttaatataattaccagtaaatttgaaattgtttcaatcatctcatttttcctaggttttgacttaactgactcacgttccttttgcctttacttgactgactttgaattaaatatgtttattattttattgttatctccatgaacttgctagttacagccatacaaatctgtgtagttatgctaataattaaatcatatactctgatacaattaattactttaacccctcccacaaaatgctaatactttagaacacttttaattctctttttagctgtttctgacttttgtattaccattctcatgcatattaattctacacatattttactctccaggagacatttctagtattgcttcataaagcaatatgcactaatatttacctacagcttatcttgtgcattcatctttgttcctttctgcatttctagcattcaatctgggattatttccctgtggacttgagaattcattctagtatttttcttctaattcaatgctgctaacaactaattgttttcctttacacttttatttaggcatctttatttgggggcaatattgctgtcaggtacgggtgtctggtttgacaaatttctttcagcatattagaaatggtgccccactgatgtctatctcattttacctgtgttgagatgtcagctgtcaggcttttccttgcttctttggtttccacattctctaaactctttctcgttgtggttggtttgtaggccacagtgtagctcattattgcttcctgtgtatttcctttgcctagagggtgtggagtcaattgcatctgtgggttgatgtctttcattggtttggaaggtgcatatgtatccttcacttctgatatccattcttgtccaagttctctctactcttcttttaatcacatcccacttgtctctgaagtttccaatgttgttcatgctttggtgggaatatttgctcttgaaccttgttccactttgctaatctaccttttttctaggttcagtctcattttaattttccttccttccttccttccttccttccttccttccttccttcctgtcttccttccttcctgtcttcctttcttttctctcttttctttcgagatggggtctcactctgtcacccaggctggagagcagtggcgggatctcagctcactgcaacctctgcctcccgggttcaatgattctcctgcttcagcctcccaagtagctgggactacaggcacatgccaccacacccagcttatttttgtattttttgtcgagacggggtttcaccatgttggccagggtggtctcgaactactgacctcaagtgattcacctgccttggcctctcaaagtgctaggattacaggcgtgagccaccgtgcctggcctaatttcttatactcttagtttcagttctaagcataaaacacagtaaatagctttaattaaaaactaggtagaagaacagcttcacagtcaatgaggagataatctgccttcttgatacaatgaaactctaaatagaaaggagaaaattcaaatttgaaccatattaagatacattaagagcaactattcattcaaatacatcagtaagagagaaagcgtggaaaaccggagtgggggaagaggtttggatcctgtacccccaggaaagtacatcaagccagagtatatatataaaaaaaatcttaatatttaaaaaaaagagaataatgtcaaacaaacagagaaaaataatgaaaacacacttgaaactgggtgaaaaacttgaatggatcctacacaaaagaatataaacaagtgaccgtaaaaaattattattatcattattattattataaattttcaggtggagtcttgttctgtcacccaggctggagtgcagtggcacgatcttggctcgccgcaactctgccttctgggttcaagcgagtctcctgcctcagcctcctgagtaggtgggattacaggctcccaccaccacgtccagctaatttttgtattttgagtagaaacagggttttaccgtgttgcccaggctggtcttgaactcctgacctcaagtgatccacctgccttggcctcccaaattgctgagattacaggcatgagctaccgcgcccggcctaaatgaccagcaaaatttgagcaaatgtttaacccttttagcttcagggaaatgctaaaaaaataaaaattacaatgagatactattatacagatatctatacattatattataatatataattatattataatattatataatataattatatataaattatatataatataattatataatatataaattatatataatatataatagaattatataatatataattatattctatatagaatataattatatataattatattctatatagaatataattatatataattatattctatatacaatataaaatataattataatatataatataattataatacataatataattatatattatatacttatagataatatataataatataattatataatatattattatataattatatatataatataattaatatataattatatattatataattaaatataattatattataaattataatataattatattatatataattatatatataattatattatatataattatatatataattatattaaatataattatatattataatatattatatataattatatatataatatattatatataattatatatataatatattatatattataatatattatatataattatattatagattataatccataattatatatattataatatatataattatatgatatattataatatattatattatatataattatatattataaataatatattatattatttataatatataatattatattataatatataattatatatattataatatataattatatatattataatatattatatataattatattatagattataattaaatatatttaaattatacattataatataattaaatatatttaattatattatacattataatataattaaatatatttaattatattataatgtataatacaattatataatataaattatattataatatataattatatattttacatttcatatataatacaatatattacatataatgatagttatatataatacattatatataaatataattatatacaatagaatatgttatatataattataattatatatattatagataataaatatattcattatgtatattatattttttatattatatatttactattattggaattataatttattttatgtaattgtatattatatattataattatatattatatgtataattacaatatataatatataaattatatattatatatgtagattacatgttatatataatatatgtaaattatatattatatttatatattatatgtaaattatatttttttcatatattataatatatgtaaattgtatattatatttatatattataatatatgtgaattgtatatatctatatattataatatatgtaaattgtatattatatttatatattataatatatgtaaattatatattatatgtgtaaattatatatatttatatgtataaattatatattatatttatatagtataatatgtgtaaattatatattatgcaagtatatatagcttatatatagtataattatacaattctatataatgtaattatatattaaatatatgtaatttatataatatataatgtgtatttaatttatattatataattacattatgtgtttatatatattattatagagagagataaacaagaatctccatgtgctccccaaactgtctctgggtttccatctgtgggatgcctttcccagtgtcctaaggatcttggagagctcccttctgtggctctctgcagggagacagactatccctaaatacaactgccagacacagaacaaaactgttgccgtcatgccaggtaccacgtcagtatcttcaaccaagattggagctcttctggggtgctacagaagcccacgggtaaggagtttgggaattctacagagaaatatttgggtctcccctaatgccactctcttacatctcatcgaatggaaaggtggacactgagcttacatatccatgagagttataacagagttataaacagaccttagggaattccctgtatcatgaaatgatcatgatggtgatgatgctgatgattattattattattttggaaagaaggtctcactctgtcaaccaggttggagtgcagtggtacaatcacggctcactgatgtctcgacctcctggctcaggtgatcctcccgcctcagcctcataaggaactgggactacagatgcatgccaccacacctagctaattttgttgttgttgagaaggggtctcacaatgttgcccaggctggagtgcagtggcatgtggtatgatcatggctcactgtagtcttaacctcctgagctcaggtgatcttcctgcctcagcctcccaaggaactgtgactacaggcgcatgccaccacacctggctaatttttgtattttgggtttttttggtagagatggggtctcactatgttgcccagcctggcctcaaactgttggccccaagtgatcctcccgccctggcctcccaaactgctgagattacatgtgtgtgcccagtcaacattattaacaatagcaaggatgggaataaaacagaacgtgcagtggatgctgtgagtctcgacccagagtcctgtccatggccaatgcctccatcccccagctgctgagaatactgactgctgacagttcatagctgtgtgccttactggaaacatcaggattacaggacgccaggaattccgcaacacagagaagtaccccatcctagaatatgactttctcaggggcatccagagaccaggctcacacctataatcccagcaatttgggaggccaaggcgggcagatcacctgaagtcgggagtttgagaccagcctgaccaacatagagaaatcccgtctctactaaaaatacaaaattagcgggcgtggtggtgcaggcctgtaatcccagctacttgggaggctgaggcaggagaatcgcttgaacccggaaggcggaggttgtggtgagctgagacggcgccattacaaacaaacaaaaaaccaaaacaaaacaaaaaaaccagagaccaatgactgtcagatgctagagatacaaagagaaaatttactaaagaatttacttctgcctttcacaccaaaagagagaaatctctggtttccaacacttcctcaagacagtgaaccctttccaatacacagaagacttttactttagtaaattctggattgaccttttttttttttttcctacttgctggatcgcaaggtggaagaattgtggagcttgcccatcaaattctgccactgcactccagcctgggtgacagaggagacttggtctcaaaaataaaaataaataataaatgtatacattttgatgggtttggacatatgcacacacttatggtgccaccaccacaatcgaggtactaaatatattcattcatgtcatgcccttttcaaagtacaaggaccaggtcaggagcagtggtggctcatgcctgtaatcccagcactttgggaggccaaggcaggaagattgcttgaggccaggagttcaaaaccagcctaggcaaaatagcaagagcctgtctccataaaaaagaaaagaaaaagaaaaaaatgaaaaattagctgggcatggtggcatacacctgtaatctcacctactcaggaggtcgaggtgagcagatcacttgaggctaggagttcaagaccagctggataacatagcaagaccctatgtctacaaaaatgttttaaattagccagatgtggtggtgtgcacctgtagtcctagctcttcaggaggctgaggcagaaggatcacttgagcccagaaattcgaggctacagtgagccatgatggagccactgcactccagcctgagcagcagagtgagagatcctgtctcaaaaatatatatattattactgttagtaaaattagaaattagatggtaaattaaactttctaacattaatttttataggttataaatttttataggtatgcatccatctctgtctagatattaaatctgatttattcggctgggtccactggctcacgcctgtaatcccagcactttgggaggccgacgcaggtggatcacctgaggtcagaagttcaagaccaacctgagcaacatggtaaaaccctgcctctttttaaaaaattaaaaaaaaaaaaagactacataatatgactatgtgttagtagatgagtgattaaataaattttggtacagcaattaattggaatatcataccacttatttaagacttggctaaacactcatatctacctggaaaaaagtccatggtctgttaattttttaaagtaatctccagaataattagtatatagtattatagtatttttaaaaactattttaaaactctcaatataggaatatatattgtgataaaatgctttttctagtatttatgtagtaaattatattattacatgtcttaagtttaattttttgtagagcaaggactatagtaatggtcacctcaaagtcaaattagagaagggaaagggagttttatcttattttttactttaatttttttttttgagatggagtttcactcttgttgcccagtctggagtgcaatggcgtgatctcggctcactgcaacctctgcctcccaggttcaagcaattctcctgcctgagcctcccgagtagctgagattacaggcaccacacccggctaatttgttttgtaattttagtagagacagggtttcatcatgttggccaggctggtttcgagctcctgacctcaagtgatccacccacctctgcctcccaaagtgctgtgattacaggcatgagccaccacacccgggaaagggagttttgaattgtgttttacatactccatatttgtgagaatgagcatatattattttattaattttaaaaatctaattaaaaacttttaaataaaacaacattaagaactatgaaatgtaggggccaaccccacagggtcagtgggtttttctccctgtgtgtggagacaagagattgtagaaataaagacaaagagataaaagaaaagacagctgggactgggggaccactaccaccaagatgcagagactggtagaggccctgaatgccaggctgtgctgatatttattggatataagaaaaaggagcagggtaaggagtgtgagccatctccaatgataggtaaggtcacgtgggtcacgtgtccactggacagggggcccttccctgcctggcagccgaggcagagagagagagggagagagagagacagtttacgccattatttctgcatatcggagacttttagtactttcactaattttgccactgctatctagaaggcagagccaggtgtacaggatggaacatgaaagaggaccaggagtgtgaccactgaagcacagcatcacagggagaccgttaggcctccagataactgcaggcgagcctgattgatgtcaggccctccacaagaggtggaggagtagagtcttctctaaactcccctggggaaagggagactcccttgccccgtctgctaagtagcgggtgttcttccttgatactgacactaccgctagaccaaggtccgcttggcaacaggcgtcttcccagccgctggcgttaccgctagaccaaggaggcctctagtggccctgtccgggtataacagaaggctcgcactcgtcttctggtcacttcttactatgtcccctcagctcctatctctgtatggcctggtttttcctaggttatgattgtagagttaggattattataatattggaataaagagtaattgctacaaactaatgattaatgctattcacatataatcatatctatgatctgtatctagtataactattcttattttatatattttattatactggaacagctcatgccctcggtctcttgcctcggcacctggatggcttgttgcccacaatgaaatatgaaaaatttagcacacagatcaccatatgtttcctcatctataaatagtgatagatagtaacaccttccttataggtctctgtgaaaatatttagggataatgtatgtaaaactgtttattaccaggcaggttggaaagtaatgtcccattcatttgtccactaggatggccatagggtttttggttttttttccttttaattcttgaattccagagtcttcaaatacattccattgttgtaaagtgaatcatattcacattttttccctagagtttagcgattccttttgcatacaaattcaggctgtatgtgttcacacatagatctcaaataacatcttaattttcacaacgaaaagctcccttcctcaccctgtagcctggctcctagaagcaacttttttttttttctgatagtaattacatatttgtaagttaggtatttatactgctttttcatttatcagctttaaactatattgaattactttcttctccgaaacaattagcacataactcttacgtactgtaaaactaattttcctcaccaaacataatcatttaaggaatctggataaatcaaaattcaatgtttatcattttatgacatcaatatttaccatttgtagcatctaaaccttagccagacatgtaacaagtagtatgtcattaataattttttctcattttttcttttgatctcttaaattttaaaatttccttttttatttcttcctatgaatccaacacctattttctccaccagaaatgtagttctcttttcagtagatccagatgtgcactagacaattaatcagctttggctttcacttggagacatccctccctagtcctccctcccctcgtccccctctggatgggagaaatatgcatacatgatcccatttttgaaagaaattaggaagctcaaaatcacacaaaaaggctgggtgtggtgtggctcacacctgtaatctcagcactttgggaggccgaagtggggtatgacttgaggccatgagttctagaccatcctgggcaacacagacctcctctctacaaacaaatacaaaaatagtcaggcttggtagtgtgggaggcccgggtggaaggatggcttgagctcaggaggtcgaggctgcagtgagctatgattgcaccactgcactccagcctgggccacagagtgagaccctgtctcaaaacaaacaaacgaaaagccacacacacacacacacacacacacgccctaaatgtgtggctatatcattttaacaggcggtgaatgtggagaaatgactgaagaaaactttaaagagttcattttgcatcctgctacctgaacagttttaaaatccacaaaaagccctacacccaaaaactgacctccaccaagtcttgtcctctcagcctactagctcaaccccattccatgccccaccactgccttatcttgtccacatactcgcccaccaaacctggtattaacccacagcaagatccgcccatcaaacctaatgcccgcccacaacctcgccccggaacttagtctctgtcctgacagccccgcccccatgcctggtaccgcccacggtcccgccccagaacttctccccacccccggagctgatctccacccacactcagccctgcctccaggcctggtaccgcccacagccccgctccagagttggtccccgcccccggaactggtccccgtcaacactcaggcccgcctccaggcctggtaccgcccacagccccgctcaagagctagttccgcccccaaccctgccacagacccgcgccaggacgaccctgcctccgcggctgtccctagccagggcccaacctggttctattaataactaagcaaactagaacacctcagccggaggctggggtgcgcggctgctgcacctgcagcctgaacccgggggtcctgacacgccgcattttgggctgggaccagctggagccggaagcggaggtgcagtgtggctagccggagaccggaagcggaagcgcgcttgtgtcttgtgagaagagccgcgcttgcagcgtctgggagaatctttcggtctccgcgagaggtgcttcattccgtgagtccgagtccagagaggggccccagccgcgggcctgcgtccctcccgggagccgggtttccgcccctgaggcctcgggctgtgcgctcagttaagcccgaagctgctgtttcctccggtgtccgggccccgcgcccctgtcatcctcactctgtcgtcctcaccctgtcgccctcacccggggcgattctgcgccccaggggacttttggctatagttggagacggtttgggatgtcacaaaatggagggtaggagggactgtgctactactgtaatctagagggtggaggccagggatgctagcagctcagcatcctgcagcgcgtaaagcagccgccgccagcaaagactcatccagccccaaatgtcattagtgcccaggttgggaaaccctgctggagggcattaaaatctctgcagtcctgaatacactgtagaaattatttagaattcagccgagtccacttataaggcctaaagtgacgaatttaaagcatctggagtcaccatacaatctccagccaaatgagttaagcaagtcagatgaaaacagctttaagcttcttgtcccattttagggaccagatggctggataggaatctggtgaattcaggcacagccagtagcctgggttcttattctttaaatcaattttttttaagtgaatggggtggtctttctatgcaacaactgtattagtctcagtaaatacattttactatacgtacatattactccctacaaaaggcctcataagcgatttttgtgccctttttatttagacgaaaaaagtataattcaagctcagatttgtgttgaaaccagcctcaagtttcacctatcctcactgatccgtggacttctgtatgatcaggtaggtaccgtgtagaacctgcaagttgcaagactccactgtgtagaaaacctgtgaatggatttttcctgtgttcaggttgtaaacacaaggactcactaacagtgagggtatttttttttttttttttgagacagagtctcactccgttgcccagcctggagtgcagtggtgcgatctcagctcattgcaacatctgcctcccaggttcaagcagttctcctgcctcagcctcccaagtagctggaatgacaagggtgcaccaccacgcccagctaatttttgtatttttagtaaagatggggtgttgccatgttggccaggctggtctcgaactcctgacttcaggtgatccacccacctcggcctcctaaagtgctgggattacaggtgtgagccacgagtgagggtatcttaaaaattatttgtttgatgccttatattcaagagaaggatactaaggggtgtgtgataatgtgtgtcaaaataagtcagtaaatacagctatatgcaaatcagtacacaaaacatgtaaacactatttaaaagtttttttttcaaccttccaagacatctcaatttttcttttatttttttcttttcctaacaggcctgccagcctgtagacttatgctgtataataaggtagctgctggtccatgcggttgttttaatttaaatgtagaccaattaagattccataaaattttaaattcagcttctcagtcgcactaaccacatttcaagtgcttgacagcgacatgtggttaatgcccctattgaacagcaaagattaagatcatttccatcatcccagaaagccctgctgggcggcattgttctagtctcttcccatctgtccattgcaatgaagccagaacggctattgtaaaagataatttgtggccaggagcagtggctcaagcctgtctgtaatcccagaactttgggaggccgaggtaggtggatcacctgaggtcaggagttcaagaccagcctggccaacagggtgaaaccccgtctgtactaaaaatatataaattagctgggtgtggtgactctcttgagcctgggaggcggagactgcagtgagccaagatggcaccgctgcacttcagcctgggcaacagagcaagactgcatctcaaaaaaaaaaaaaaaaaaaaaaaaagctgggcatggtggctcacgcctgtaatcccagcacttcgggaggccaaggcaggcagatcacgaggtcaggagatcgagaccatcctggctaacgtggtgaaaccccgtctgtactaaaaatacaaaaaaaaaaaaaaagattacccgggcgtggtggcaggcgcctgtagtcccagctactcgggaggctgaggcaagggaatggcataaacccgggaggtggagcttgcagtgagccgagatcatgccagtgcactccagcctgggtgacagagcgagactccgtctcaaaaaaaaaaaaaaaaaaaaaaatacagccaggcacagtggctcacacctgtaatcccaccactttgggaggctgaggtgggcagatcgcctgaggtcaggagttcgagaccagcctggccaacatggcaaaacactgtctctactaaaaatacaaaaattagctgggcatggtggtgggcacctatgatcccagctactcgggaggctgaggcagacagaattgcttgaacccaggaggcggaggttgcagtgagccgagatctcaccattgtactccagcctgggtgacagagcaagactgtctcaaaataaatacataaagataaatttgctttagtcactcgcctgcctgaaaagcctttgctggctctccactgcctctcatgttcaaactcctcaccactctttataatacctttcaaaatacaacctttcccgtgcactctggccccttatttgtccacatgctccaaactgtgaacttggcttcctaagcagcttgctttcctgcctctgcacgtgcactttccactgagcaagaccctacctcgactctcaagactcaattcaaatgttcttagtgtttttccttccaaggcttcccagtccccttcttcccagatcctgggttggatgccatgtgcccctctgccatatcacatatcactctgaaatgcagcagcaggtctgtgtgtgtgtcctgctcccagaaagccagttcttagatgacagggatcttcctcccctccatctccagcacccagctgggggcaggtatcaataaaacgtgaatgaggggtcaacgtcgggaccctagggctgcagaagggatttgagaggaataactgggtgaggaaatgctatgcctggtttggacttgggagggaagagggggcgacccaccaggggctcacctgtgcagagttctcttctctaccgtttgtgcaacacagctgctggaagagcccactcacaaacaagtataaatacatggaactgtagagaaataatacagatatttgtttttttggttttttttgtttttttttttttgagatggagtcttactctcacccaggctagagtgcagtggcatgatctggtctcactgcaacctctgcctcctgggttcaagcgattctcctgcctcatcctcccaagtagctgggattacaggcacccaccaccatgcccagctaattttttaaatatatttttagtagagacaaggtttcaccaacttggccaggctgttcttgaactgctgacctcaggtgatccgcccacctcggcctcccaaagtgctgggattgcaggcgtgagccactgtgcctggctataatacagattttcttgcatgtcataatactaaaactttcaggcttttacatataagtacaaatatataaacttttcacatgtatatgtgaattttgggggttctgttaacaccacagagaccagatgtcagagacacttggcagctatattaactggagggtgggggctgtgaggctgcaggcaggaatgggaaagagcctcccatctctgcttggctccaagtaccagcgaacaactggcctgtggggaatggctctccattcagtcctctcccaatccttctctccccggagattgggggtatgggggtcacccaggataaattccctgggcaagagatctagaaggaagccagggcctgaatgctacatctcaatacaaattcctagagagactgagtggccctgccttccatgaatagccagcaccgtccaccctctacagctctgttttgtctacctggcccaaactcttacaagtctctaactgcagacagcgcctgcccccgcccccaccaacccctcccacacacacccttgaccactttttttttttttttccaaatggagtgttgctctgttgcccaggctggagtgcaatggtgcaatcccggctcactacaagctctgcctcccaggttcacgccattctcctgcctcagcctcccaaatagctgggattccaggtgtgtgccatcacgcccagctaattttttatttttatttttttagtagagatggggtttcaccatgttagccaggatcgtctcgatctcctgacctcgtgatccgcccgcctcggcctcccaaagtgctgggattatagacaggagccaccgcgcctggccagccgctttcatctttgtgtgtatatacacacacacacacacacacacacacagcccttcttttctcataaaaaaggaaacattccatatatgctatttggtacttttttttccccttaaatttactgacgataataacctctattgatatctagagatcttctctcttttttttttaatgggtgcactgtaatgccacagtgaataatcttacacaacttttacatttgtgtatcttacagatcgattcttagaagttgcaggaacctagggtctctgatagaaaatggctggagctctgctgggctggcatgagagtggggagtggggaggaggaaatcaactgaaatgaggggtagtgacatctgagctgggtgaggtggaaaccaggaggagggggtggtcaaggcagatcacaggctggagagggggtgaccgaggcagggcacgggctggaggggggtgaccgaggcagggcacggactggagggggggtgtgaccgaggcagggcacgggctggagagggggtgaccgaggcagggcacgggcaggagggggggtgaccgaggcagggcacgggcaggagacggggtgaccgaggcagggcacgggcaggagacggggtgaccgacgcagggcacgggctggagggggtgaccgaggcagagtgttccccccatttcttccagggtgctgtcctgagagcgctgcgggataaaggaggagcgtcctgcttcccggctgccctgttgctgtcggagtcacaggatggcggctgtcgtcctgcccccaactgccggtgagtcatggggtcctggcagttctcagagtccaggcttgaaaggtcctgacccacagcatgggatgggagggggttgggcagagcaggtgaggcaggagtggagccccaggggcccagaggtcctccgtgtctgatcgggcggctcttgggacttgggacttaggcatttgggtgtctgtggatgtcacctgtgtggtgaatgtgctggagcttttgaattctcccttcagttctttctgtgaacctgataaaaacacagtgacgccctcggaacttcagtttcctcatctgtgaagtgggaataatcccttccccaagtgcagtcagaccttaagccctgtttcctggcgtggatgcggcagggccatgctctggtttccttggattgctgtgggttggtgtttgcttggagtagaggtggatgctttgtgggtgactgtgtatgcatggggacctggtcgatcgcaggcaggtggggaagcctccagatgtgtgagtggacacagggcaggtgtggattcctggtactcatttctcctcctccagctctgtcttccctgttcccagcctctcagcgagaaggacacacagagggcggagagctggttaatgagctcctgaaaagctggctaaaggtgagtcggatgttcctttttccaaatcatgattccttcagccagaaggttggacttgatgcctttcagtggcctggagccccacggccaaacttgttcctcaggcatcccagggtctctgagtgagggctgcccagaaaatgtcagtgtgtgtcaacgtttactgcaggttcagagctccctccagagtccctgagtacatcatgtgctcctgagagttttaagggaaagccaagtaaagacgtgatgatgttctaaacccaagcaattaataaaggccatacggaaatcattcattcacttaccaagtatttctctgatttctgccatgtcacgggcccatgatcccctggagactgagggaaataagatcataggagctcccagtttgagtgagaaaagacagctgctctgcggtactgtgcgctggacctgggagtagcctaaggagacaagcattgagggctgagctcagaagccagggagaagagctcagaacctcaggagaggagctcagaatccccccacatctcgtgctcaggtttccccagccctggctctgttctcctggcccctcttcctgtgcacattggtgggggtggtccttggctaagccgtgatgtttgcaatgctttagggcttggtgacctttgaggatgtggccgtggagttcacccaggaggagtgggcattgctggaccctgcccaaaggacactgtacagggacgtgatgctggagaactgcaggaacctggcctcactgggtaagcctaatgtcattcctgcatttatttaatgactcaggaagtcagtcttttttttctttttttaaattgaggtaacacaggacacaaaagtcaccatttaaactattttaaagtgtccaatttggtggcttttcgtaggttcacagtgtagtacagccatcaccactaattccagaacatagttgtcacaccaaaaataagccccatagtcatgaaatggtctctccccagttctccctcctgaacatcttggcaggcactaatctttccgtctctatagatgtgtctcttctttttgagggggttgtttttagacagtgtctccctccgtcacccaggctatagtgcagtggcgtgatcctgagtagctgggaccacaggtgcggaccaccacgcccagctaatttgtttattttttgtagagacagggtcttgctatgttgccctggctggtctcaaactcttgggctcaggtgatcctcctgccttagcttcccaaagtgctgggattacagatgtgagctaccattcctggcccaattcttgacattttatataaatgaaatcatacaaaatgtggtcttttgtgtctcactttttgcttagcataatgttttctttctttttttttttttttttttttgagatggagtttcactctgttacccaggctggagtgcagtggtgtgatctcagcttactgcagcctccaccttccaggttcaatctgttctcctgcctcagcctcctcaacagctgggactaaaggcatgcgccaccacactcagcaaatttttgtgtttttaatagagatggggtttcaccatgttggccaggctggtcttgaactcctggcctcaagtgatccacccacctcagcctcccaaattgctgggattacagggatgagccaccacgcctggccgatgttttcaaagtacagctgtgttgtagcacatagcagaacttcattctttttatggttgaatattattccgttatgtgtatataccactttttatatatcatttcatcagctgatggaaatttagcctgttctcatcttttggctattgtgggtagtgctgctatgatcattcatatacaagattttgcttgagcacctgttttctcttgggtatatacctaggagtggaacttctgtgtcctgtggtaattctgtgtttaatgtgttgaggaatgtccaaacttttctacaactgctacaccattttacattcctaccagcagtgcatgagaccagcaacgtattagtttctctgcatccttaccaacatttgtctcttttcctttttttaaaaaattatgatagccattcttgtggttgtctgtctcattgtggtttttatttctattccctaaaaaaaatgatgagattggccatcttttcttgtgcttgttggccatttatacatcttttttgaagaaatgttcattcaagtgctttttccatttggggggcattgtttgccttttcgttattgagttgtaagagttctttatatgttctgcatcctagacctttatcaaatatatcattttcaaagatttcctcccattcagtggattgcctttttactatcttgaatgatagttttgcaggagatagaattcttggttgatatttttctttcagtacttggagtatgtcatcatcccactggcttgcggcctccatggtttctggtgacaaatcagctgttaatcttgtacatgatgacttatttctcccttgccatttttcaggatagtctgtctttggcttttgacagtttaatgttaaggtatctcagtatgagtttttaagtgtatcctattgggagatccttgagctgctttgatgtgtagacttgtaattttcatcaaatttgggaaagtttggccattatttttacatatattcctttttttttttttttcccggagtctcactctgtcgcccaggctggagtgcactggcacgatctcagctcactgcaacctctgcctcctgggttcaagcaattctccctgcctcagcctcctcagtagctaggattacaaacgcgcaccaccacagctagctaatttttgtatttttagtagagacagggtttcaccatgttggctaggctggtctcgaactcctgacctcaggtgatcctcccacctcggcttcccaaagtgctgtaattagagcgtgacccattgcaccttgccaatttttccatatattccttctgctcctttctctgtctcctctccagtagcaactcccattatgtgtattcagatgtttgatggtatcttctgggtttcttaggctctgttcatttttttccctttatttttaatttctgctctacagatcaggcaatcttaattgacctgtcatcaagttcactaattgtgtcttctgcctgatcaagtcttctgatgaacccctctagtacatttttcatttcagataatatatatttttcaattttaaaattcctatttggctcctttttataatttccatctctttatgattttctctatttggtgagaattcattctcatggtttccattagttctttgtacacagtttccattaactccttgagcatatttgaaatagttgatttgaagtcgttgcctaataaatccaatgactaggtttccttatggaaaatttctgttcatttcttttttcctataatgcagtttcattcattttttgtttctttttttttttttttttttgagatggagtctcactctgtcacccaggctggagtgcagtggtgcaatcttggctaactgcaagctctgcctcccaggttcacgccattctcctgcctcagcctcccgagtagctgggactacaggcgcccaccaccacgcctcgctaattttttatatatttagtagagacagggttcaccgtgttagccaggatgatctcgatctcctgaccttgtgatccgcccaccttggcctcccaaagtgctgggattacagccatgagccaccgcgcccggcccatttttttgtttctttacatgcctcataatttatttgctgaaaactactttcagaatattacaatatggcagttctttaaatctgatttcccccctccccaaggtttgttgtagttggtattgtttctttgtttagtgacatttctgaactaattttgtaacgtctgtattggtcatgtgtggccactgaagtctctgttctgttagcttagtgttcagcttgggattaatttgtcagagatttttttaaatacctggaacccaaaagatgaccagtctttgccaatggatctgaattacatgttggagcatgccttcaaaactcagctaaagcatcttacaactctgacttagccttcagttccttcttatgcagagcctgaaggtcagtcaaaggtgagggcttggtgccttctcagatcttctctgagcatgtgttcatccctgggtatgagcatggccttctagaaatgtgtggaggccgggcgcagtggctcatgcctgtaatcccagcactttgggaggctgaggtgggcggatcacctgaggtcaggagttggagaccagcctggccaagatggtgaaaccacatctttactaaaaatacaaaaaaatcagccaggcgtggtggcaaatgcttgtaatcccagctacttgggaggctgaggcaggagaattgcttgaacccaggaggtggaggttgcagtgagccgagatcacaccactgcactctagcctgggcgacagagcaagactccatcttgtgggggaaaagaaggtgtggaaagatgctctactcctcagagcatcttgttcccaacttctcctcccaggttttttggttagtcttttgtttgcttcacagttttcccttgccccattgagcagtggctgatttgcctttagatgtgttgggacacacttccctctccaccctccagcttccataggtgtagcctcttcagacctgggagagtttggagttacacaaataaagggaagccctttgatccagcccatcagggagccagcagacaggtcagaagagaacagccacaggtttttgagaataaggtgcattctgttcccttcagcactagaaacacaggttgttgtcctcaaggcaaaatggggaatagagtgtgcagctagagtcagttaaaatgtcacaaatctctcttacccagattcagctgtttgtcttgattaggcattctcctgtggctgtaaacttttgatgacattcaagagctccaatgaagttgattctgtgtttgcccatttacatactgtttttgtgaagggatggagttgtggagttccctactccactaccttcactgacattacttcgtttaagtccttcataagcacctctgttcctaggtctgtgctgggatgtgggagtagtgaagaatgcaacagacatgccccccaccctcatggagctgtctgtctaatgctatctgtatgaaatgaagatctccttctttccctgactatatattctctgtagttaaatcttttgggctttcagattctgtatttaaacctggacaggggctcctgggaccagttatcctgcaaccaccctagatattgcttgtggggtgtgtgtgtgtgtgtgtgtgtgtgtgtgtgtgtgtgtgtgtgtgtgtgtgagtgtttaagacggttgctatatttattcaattttggcataattatttctctgctcctgaagtcacacctcttcaccttcagaactgatttcagtttcatgggagagcttgtctgctgcacagtccccctacatcatgtgtcttttctccatgtacagggaaccaagttgataaacctaggctgatctcccagctggagcaagaagataaagtgatgacagaagagagaggaattctctcaggtacctgtccaggtgagcaccaggtggatataagtccttgtgaggaacagctctggccagggactgagaagttgggagtattataatacattaggaaatatcagtcagagaactgtgtaaatgccccttttcccaagaaggccaagaacgtttggtctgagccccctcatgtaccttcatgacttccaactttctgtcatctcatactttacttgggcctcaggggagaaaaaaagacatctctttttctgaaatttaagtctcctatgagctctttgatcagtttcagtccaccttgccttcctgacaattccttcattctgtcaacatcaatctcaatcttcctagagtctttcttaaacattgcctaaaattttcacacccatatctctttcaccgaatgccttctcaaaaaccctcacctctcagattctgccttcactcacgtatgcattttactatttcaccatcaacttaaaatttgcctcttttctatcaacttaaatttctttttaacttgtttcagatgtggagaatccatttaaagccaaagggttaactcctaagctgcatgtttttcgaaaagaacaatctagaaatatgaaaatggtaagactaacatgggtgattcctggtttttttcatggtagaatgccctacatgagaaaagccacaaggactggccttgttggccaggcacagtggctcatgcctttaatcccagcaccttgggaagctgaggcagttggatcatgaggtcaggtcaggagttggagaccagcctggccaatacggtgaaaccccatctctactaaaaatacaaaaaaaacttagctgggtgtggtgatgcgcacctgtaatcccaaatacttgggaagctgaaacagaagaatcacttgaaccctggaggtggagcttgcagtgagccgagattgtgccactgcactccagcctggcgacagagcaagactctgtctcaaaaaaaaaaaaaaaaaaagtggctttattaaatagttattaaaggaaagtgtcatttttttcaaagataaagtagtacctctggagagatactgtgaaattattttgaatttggagaaaagcattagttagccccaaacttgtttttcctgagaattcccacaagtaaatatttccagtagtctgagtcagatattggatatttgaaaaagaaattagccttaaatttatcaaaaatactctgtgaatatgataaagatttgtagaaagaatccatcttctttaaatgctaagaattcaaactgacagaagccatgtaccagcactcatgatggcaaaaacattaattccaatactatgatacacaacagaattcctgggagaggaaattcctctgacagcattcaatgttaaaaatattataaatggtacttattgtcatctcttaatcaataggagaggaatcatcttggagcaacactcaacgaatgtaatcagtgttttaaagtcttcagcacaaaatcttcccttacacggcacaggaagattcatactggagaaagaccctatggctgcagtgaatgtgggaaatcctacagcagtagatcttaccttgctgttcataagagaatccacaatggggagaaaccctatgaatgcaatgactgtgggaaaaccttcagcagcagatcttaccttactgttcataagagaatccacaatggggagaaaccctacgaatgcagtgactgtgggaaaaccttcagcaattcctcatacctcagaccgcacttgagaattcacactggagaaaaaccgtacaaatgtaaccagtgttttcgtgagttccgcactcagtcaatcttcacaaggcacaagagagttcatacgggggagggtcattatgtatgtaatcagtgtggaaaggctttcggcacgaggtcatctctttcttcgcactatagcattcatacaggggagtacccttacgaatgccacgattgtgggagaaccttcaggaggaggtcgaatctgacacagcacataagaactcatactggagaaaaaccctacacatgtaatgagtgtgggaaatcctttaccaatagcttttctcttacaattcacaggagaatacataatggagagaaatcctatgagtgcagtgattgtggaaaatcctttaatgttctctcatccgttaagaaacacatgagaactcacactggaaaaaaaccctatgaatgtaattattgcgggaaatccttcacaagtaactcctacctttctgtgcatacgagaatgcataataggcaaatgtgaattcaataactgtgggaaaagcattcattgatctttcatgcctcagataacatgagcaaactctaacaagatgtatgaatcacctgctactgtgtaacaaattaccccccaaaattttgtggcttcaaacaaaaacacttgttatctcaaaatttttgtaggtcaggaattcagaaacaacatagctctatagttcttcaggatatctcaagaggttacagtccagatgtcagcagaactgtaatcatccagaattgttactggtgaagggaccacttccaaatggcttacaagcccgacaagtgcatgctagctgtttccaagggagctgcgcttccaaatcacgtaggcctctcaacagggctgagtttctttatggaagcaacttctccccaaagccagtgatctaaaggagccaacacagaaagcataatgtcttttatgacctagcttcagtgagatatgttttcatgtccctgttacattggtcatacacaccaatcctgatacaatgtggaagaacaccacaggaggtatgaacagtagacatttggaaccatctggaaaacttgccatgaaatcagtggaggaaagccttcagctgaccctcatttttttttttttaagacaatgtctcactctgtcacccagtctggagcgcagtggtgtgatcacagctcactgcagcctctacttcctgggatcaagtaattctcctgccccagcctccaatgtagctgggactacaggtgcatgacaccatgtctggctaatttgtttttttttaaactagagggagggttttgccatgttgcccagactagtctcaaactcctaggttcaagcagtcctttcatcttggcctccagaagtactgggattacaggcatgaaccaccatgcccagccaacttctaaactgatcaatatgggagtagcattcaatcacccacaggttaactcactctagagagaaatcttgtgagtgtaatctgtatggtaaaactttgagctcaaactttccccctaccaaaaaaaaagtatctactggggagctgcccaggtaatgcagtagctgtaggaaagccttcagtgatggcttcagggagtcacatgacaactcacaataaggggaaaccctgtgtgtggcatcaaaaatggaaaaccaggggacactcattccttaagtcacatttcggagatcatacaacagaggaatatgttgagtatacacagtgttgaaaagcctgtgacacaaacagtcatattaccaagcacaagacagtatagtttggtatgctataaaagccttgaatattctctccatttttaagaagtgagattcatactagaaaaaccattgaattccatcagtattagaatgtcatttttccacatttttaggaacctaactcagtgtaagataacaatttatacaatttattttttgagacagggtttcatctgtgcccaggctgtagtgcagtggtgcaatcttggcttattgtaacctctgcctcccaggcttaagggatcctcccacctcagcctcccaagtagctgggactgtaggcatgcaccaccatgcctgtctagtttttgtaaagatggggattcaccatgtttcccaggctgctctcaaactcctgggctcaagtgatccacctgcctcagcctcccaaaatgctgggaatacaggaacgagctaccactctcagccagaacttcttaagataaaggatgagggaatgttttcagtgatacctcttatattaggaaaaatatgtaaatgttccttggatgcaatactcacgagtgtattaatttcagaaaaattttcagtgattcctccctttatgcatgagagaattcatttagaggaagccctaggaacgtaatcaatgttaggatgcctcatctcttaactgagtggccacgcagtaacttagaacaaaaggtgtaagtgctatgaatgtggaattaccttcatcaatgtctcatttgtaggttgggccactagctcgttcattttcagtcttttaatataaacatttatggctatagtggtcctgaaaatcttactacctcgttttatatacagtgtatttattataattctaaaacatcaatacaccaaatattcagaaaggtatttccaaacagctcctgagtgatctagtttgttataatagaaattagacatttgccaggtgtggtggctcacacctataaacctagcattttgggaggctgaggcgggcagatcaccggaggtaaggagcttgagaccagcctggccaacatggtgaaaccccgcttctactaaaaaatacaaaaattagccgggtgtggtggcaggcatctataatcccagctactcaagaggctgaggaaggagaatcacttgaacccgggaaatggaggttgcagtgagccaagatcatgccacttcactccagcctgggcaaaagagtgcaactctgtctcaaaaaaaaaaaaatcagacaatatttgatatatttttttctaatttaatagtattttgccagagtacatggactttgtgattttggttgttttctctttgtgtcctaatatagcaaatactgtttctttttttttttttttttttttttgagacggagtcttgctctgttgtccaggctagaatgcagtggcgcgattgtggctcactgcaagctctgcctcccagattcacgccatcctcctgcctcagcctcccgagtagctgggactacaggtgcccatcaccatgcccggctaatttttcatatttttagtagaaatggggtttcactgtgttagccagtatggtctcaatctcctgacctcgtgatccacctgcctcggcctcccaaagcactgggattacaggcgtgagccaccatgcccggcacaaatactgtttcttaatgttcattctccctacttaaagaaaaagataagttgtcaatgagcagtattgaaaatgtacagtggggccaggcgccatggctcatgcctgtaatcccagcactttgggaggccgaggcaggcggaccacctgaggtcaggagttcaagactagcttggccaacgtggtgaaacctcgtctctactaaaaaaaatacaaaaattagctgggcgtgatgacaggtgcctgtaatcccagctacttgggaggctgaggcaggagaatcgcttgagcctgggaagcggaggttgcagtgagccgagattgcacaaccacactccagcttgggcgacagagtgagactccatctcaaaaaaagatgtacagtgtactaggctttcctgaagcttagacaggctttatcccactctgctggctaaaagaagtaggaataacgcactgggtgagacaccgtctggcttattctcatctattttcttttcattcttttggaaagtggacacaaagcatagagttaaaagagcttttttttttttttttttttttttcttcactgtggtgataaaaaccacagtgcaggggctgggcgtggtggctcacgcctgtaatcccaccactttgggaggccaaggcaggcggatcacctgaggtggggagttcgagaccagcctgatcaacatggagaaaacctgtctctcctaaaaatacaaaattaaccgagcatgttggcgcatgcctgtaatctcagctacttggaaggctgaggcaggagaattgcttcaaactgggcagaggttgcagtgagccaaggttgacccactgcactccagcctgggcaacaagagcaaaactccatctcaaaaaaaaaaaaaaagaaagaaacagtgccgaaaaatcacaatgatttgagttcttcaaaaacctttgattggctgcattggctctgttctgcatattactagacttcttacatgatcacaagtaaccactaattggttaaaaccaaagagagagagagagagagtgtgtgtgtgtgtgtgtgtgtttggttggggggtgttgtgttagcttccaggtgaatgcattatctgttaatcctgtttattgatctgtttttataagtgctccatgattctctgaaaacagtatactatgtatctaatttttggatacaggatggacatacgtactcaaactgtgtttttcaatttgtactgtatttgtttctctcgacctgacttagtgatagaggtatattaaagtcttccactagcatggtagattaacaaattctttctgtaattctgtcatttttactttatatatgtttatgtgtaatgtaactaggtgcgtagaggtttagatattctcctgtgaatttatttattttcagtaggggccataccttttcataccaaataattgtaatatgaaaatatattaacaaaaagagatcaaacatttcgctagcccatcctatagaccaggcgctcttcaaagtgccttataaatattaactgcgtcctcactataagcttgcaaactgtgctattactgtctccaacttacagatgggaaaactggcatggaaatgtctaggttgcttgcctgagttcaccagctagtaagtggtagagcacagattggaatccagacaggtgattctcataaccactagcctgttcattgagtacattccatgtggctaagcactgtttgagatgccatgtctagagcagtgaatgaaactcaagttttgccattgaggcacttacatcctaacggggaggggtgaattatagaaaaatcaacaacatggccgggcgctgtgactcacgcctgtaattccaatactttgggaggctggggcagatcatgaggtcaggagtttgagaccggcctgaccaacatggtgaaacgccatctctactaaaaatacaaaaaaattagctgggtgtggtggtgcgctcagctaatcaggaggctgaggcaggagaatcgcttcatcctgggaggtggaggttgcaatgagccgagatcgcgccactgcactccagcctgggcaacagagcaagactccatcgaaaaagaaaaatcaacaatattcatgttgtgcagaaaaataaagcattgtgagagagttacggagggctggggactttccattttatgtagcataggaaggaaaaggcccccagttaaggtgcatttgaggagagactattgagtaggaacttgtggcaagaggactgttggcatgcaaagacccacagcacagaggccagtatgactcaggtaaaatagggattcagggattagagggtaatcggagatgcagatcctgatcttgtggggttttataggtcattgttagggcttttccttacatgttcaggaagttggaatatcaagagtcccagcaggaaacagttgacacacacgtcaactgggatgattcaagcgcagtttatatcaaggggctcctcacagaattgtgaacaggatgtagggaaaccacaaaaggtacttgaaatggaacatcggtcttctccccacctcagatacgggtgcttctggttctccagccttcagactcagactcgcaacttacaccattggccctcctggttctcaagcctttggacttcacactggggtttacactgttggctcccctgttttcaggtctttgagcttggactggagcaagactaccagctttcttggttctccagcttccaaacaaatggcagatcgtaggacacccataagcctgaagggacaaaggaagagaactgcaagttgttgttcaagcgaggagagggctgcattccaggagctgacaggaggtcagtgaggggcaacatccagcctcgagttctgcaagaaatagtaagggtcggccaggcacagtggctcacacctataattctggcactttgggaggccgaggtgggtggatcacttgagatcaggagttcaagaccagcctggccaacatgatgaaacccattctctactgaaaatacaaaaactagccgggtgtggtggcatgcgcctgtagtcccagctattcaggaggctgaggcaggagaattgcttgaacccggtaggtggaggttgcaatgagccaagatcatgccattgcactccagcctgggtgacagagtgaaactccatccccacccccccaccaccaccaaaaaagagaaagaaatagccagggccagccctccttgtccttcattcttcttatatcatatttgggttccccatttgccaaactcaaccaaaagccaataaggtaagggagttcgttgatagcattcatagtaactaatcatcccaagtacagcagggtagaggaggtgaatctgctggggcgaatggaagatacccagtattggtcactccttttgcttctcagaatctactcatgcccatcacctggatggaaagttcatatccaagcccaggaattctatcagttgctcagctaccctggggtggtgtccatgcactgatactccccgatgaagcctaacatagttgccaacaccagtgtttcctgtataggatgaggaacagagccattggggaggaaagcaaaagaaataattaacctggccaggcgcagtggcttacccctgtaatcccagcactttgggaggccgaggtcggtggatcacgaggtcaggagtttgagaccagcctggccaacatggtgaaaccccgtctctactaaaaatacaaaattagccaggcacagtggtgggcgcctgtaatcccagctactcaggaggctgaggcaggagaatctcttgaacccgggaggcggagattgcagtgagccgagatcatgccactgcactctagcctgggtgacagagtaagacttcatctaaaaaaaaagaaaaaagagaagtaacctaaaggacttggttcccagagggaaacacttccaccaagagacacagtaagagtctcatcggatgttaaactgtgacttctatgagaccagcacacaaggaaagaagtcaccatactgacttaggtaattaatgctatcatccatagaatctgaggctgctgttacatgatgagtgcagggaggaaaacatttggcattcacggaatccattgggatgtctcttactattctttccccaattttaaagataaaaaaattttggccaggcgtggtgggtcacgcttgtaatcccagcactttgggaggccgaggtgggcacatcacaaggtcaggagatcgagaccagcctggctaacatggtgaaaccctgtctctacaaaaaatacaaaaaaattaactgggcgcgttggcaggcgcctgtagtcccagctacttgggaggctgacgcaggagaatggcgtgaacccaggaggcggagcttgcagtgagccgagatcgcgccactgcactccagcctgggcaacagagcgagactctgtctccaaaaaagaaaaagataaaaaaatttcaccagctatgtcctgagaagggcatggtgaagaccccgtaggcataaggatctggagcagctctccaggtaagccacctagaccagcaggatctaggtgagaaggaaatctagaattttcaccctagtcaagggtaaagggaatctggaaggtgcaagtaaaggagtgtgataagcatcaattgcatctctgagacttgttcaggtggaaagggctgtctacagtttgtcccactgatcttcctcttgtcagtttctccaggcaacgggaccaacctggatcctgagggcacttactttaagaatcctggggccgggcacagtggctcacgcctgtaatcccaacactttgggaggcagaggcgggcagatcacttgaggttaggagttcgagaccagcttagccaacatggtgaaacctcatttctactaaaaatacaaaaaatagctgagtatggtggcacatgcctatagtcccagctactccagaggctgaggcaggagaatcacttgaactcaggaggcagaggttgcagtgagccaagatggtaccactgcactccagcctgggcaacagagggagactctgtctcaaaaacaaaacaaacaaaatgaatgcagggcatctgagtggcacacatggtggaccacagtaggtacagtggtggcactacccagcaaaagagctcttcacccaatgtgctagaagccaatactatgacatcagatttttgagaaaaggaaaggtttgtattgcaagttaacaaggagacaggagtccagctcaaatttgtcttatgctgactttaaggcaataattttcttagaaaaggtgtagggcgtggattctgggattagcaggcgattggtgggaggaaaggtctgttaagtcctcaggcaggtgcaatgatctcttcatgcctccccatgggttccatgtgcaaagtcatactaactcaagggagtttgtatgaaacacgtggaaatttgcactgtgacatcagcaagctcattctgcacaaactccatttggccatgtgggttctcacagattttaggcagttttgttacaagtggaggcagtttcagcgttttagcaagttatttctttttttacctgccatcctgcaaactcaatgagaggtgaagccagctggacttcctgggtcgagtggggacttggagaactttcctgttttacaagaggattgtaaaacacaccaatcagcactctgtagctaggattgtaaaccgcaccagtgagcgctctgtagctagcaagaagattgtaaaatgcaccaatcaacagtctgtaaaacacaccaatcagcaagatcctgaaagcagccaattgcagggaggattgaaaaaagggcactctgataggacagaaacagaacatgggaggggtcaataagggaataaacgctggccactccagccagcagcggcaaccagctcgggtccccttccaagctgtggaagctttgttcttttgctcttcacagtaatccttgctaccgctcactctttgggtctgtgccatctttaagagtgaaggtctgtggcttctttcttgaagtcagcgagaccacgaacccaccagaaggaaccagcttccaacacatcaagaatttctgctagtctttgctttaacactttaggcatggtttcagtggcatatttcccagattcttcctttaagactaaggcactaaggccaggcgtggtgactcacgcctgtaatcccaacactttgggaggctgaggcaggtggatcacgaggtcaagagatcaagaccatcctggccaacatggtgcaaccccgtctctactaaaactacaaaaattagctgggcgtacctgtaatcccagcactttgggaggccaaggccggcggatcacgaggtcaggagatagagaccatcctggctaacacggtgaaaccccatctctactaaaaatacaaaaaattagccaggcatggtggcgggcacctgtagtcccagctactcgagaggctgaggcaggagagtggcgtgaacctggaaggcggagcttgcagtgagccgagatggcgccactgcactccagcctgggcgacaaagactccatctcaaaaaaaaaaaaaaaaattagctgggcgtggtggcgtgtgcctgtagtcccagctactcaggaggctgaggctggagaatcgcttgaacctgggaggcggaggttgcagtgagccaagatcttgccactgcacgccagcctggtgacaaagcaagactccatctagaaaaaagaaaagactaaggcactcccctagctgctggaggtgttgcctgatgatggtgatgctgctgtcctctctgggaactccccaaggcccagaggaaagtgcccaacccaagattatgctctctctccaggggttgcctacttccagtgactggttgatgtagggggtacaaaggtccagtgcctttgtttcaatgtaggacacccctgaagggcaaccccagcaccagaactccctgtgggatcgacggcagcctcagttgacaagttacatgtcagcctcatctgtcccctccgcttctcgcatgcctttaaagatgttgttcccaggagttttatccaataaacaaaaaattgccagcacaaaatctgttcccagaaaacctgatccgagataagatcactctatcagggtaaagaatccattcagggccggtctcaggagatcgagaccatcctggctaacacagtgaaaccctgtctgtactaaaaatacaaaaaattagccgggcgtggtggcgggcgcctgtagtcccagctactcaggaggctgaggcaggagaatggcgtgaacccgggaggcagagctttcagtgagccgagatcgcgccgctgcactccagcctgggcgacagagtgagactccatcccaaaaaaaaataaaaataaaaatccattcagataagggactggcagagagaaagcagaatgtggaatggatgtggaagaattaaattcagtcctgaagaccaggtcccaaagcaggaatagaagacagctatgctttgggtttgggttttttaaaaaatctttaattttttccgctttttccctggttccccaccaccaccatcaccattttatatgaagagtcctggttgtggccaaagcttaaggtttctgatgggaatacgaccaaatgacattatcccaacagtagcttcctttgtatctctttttttttttttttttttttgagatggagtctcactctgtcacacaggctggagtgcaatggtgccatctctgctcactacaacctccgcctcctggattcaagcgactctcctgcttcagcctcccgagtagctgggactacaggcacacgccagcacacccggctaatttttgtatttttagtagagatggggtttcactatgttggccaggctggtcttgaattcttgaccttgtgatccgcccacctcggcctcccaaagtgctaggattacaggcgggagccaccgcgcccggccccctttgtatcttatgtagggacatgaacttagcgccaagtgaaggacaagaattgatatccaaaatccaatagatttttcttttaaatacctgaaagtgaaactggcccaattttcccatattgctgatgtttatggtttccttgaataaacaaacaaattgatcttcccaatcttaaaacttaagaaagttacatttatcttatctgagttcctttctcaggaaaccaaccatcaggcctcccagatagtatctaggagctgaaacgcaccagaatactgcatttgtacagtgagacatcagacccatcacccatcatgattgcctaactgaccacctgcttcctgttgaccaactcctcttccttacccttccctaattcctgtattcccacacatggtaacatttcttccctgctatataaacctcaaattttagttggtcagggagatggatttgagattgttctcccacctcctcagctgcagcagctgattaaagccttcttccttggcaatactcattgtctcagcgataggctttctgtgcagtggtgagcagcaggacctagattgaacccctggtgtttcagcaacaacatagttcatcaccagcagaactgcacttcaagaaacactaaagaaagttttgggccagacacggtggctcacacctgtaatcccagcattttgggaggctgaggcaggtggatcacctgaggtcaggagttcgagacaaggctggccaacatggcaaaaccccatctctgctaaaactacaaaaaaaaaaaaaaattagctgggcgtagtggcggtcgcctataatcccagctacttgggaggctgaggcaggagaattgcttgaacccaggaggtggaggttgcagtgagctgagatcgcaccgttgctttccagcctgggcgatggagcgagactctgtctcaaaaaaaaaaaagaaggaaggagggagggagggaaggaaggaaggaaggaaggagaaggaaagaaagaaggaaagttttggggctggaggaaaattattccatgtggaagcaattccagaaatatataaggataatcaggaaagataaaatgtgagcaaatacaaataaatattgactgtataaatcaagcctgtatagttttaacacttttatacgtctaaatctttttttttttttcagacggagtctcactctgttgcccacactcacctcactgcaacttccgcctcctgggttcaagcaattctcttgcctcagcctccaagtagctgcaactacaggtgtgcaccaccacgcccagctaatttttgtatttttagtagagatggggtttcgccatggtgaccaggctggtctcaaactcctgacctcaagtgatccatctgccttggcctcccaaaagtgttaggattataggcgtgagccaacgtgcccagccctaattttttttttttttcaaataaaaagagttttaaatcacattgaactggtcccttaaaactagagataatagaaagcatggcaagccatttcccagtccccctaagactagagattatggaagccccagcaagtgattctcacaatctgcatacagcagtagagctgacagaagccctagcaggtaaccaccagtcaccctcaaaacaagaggcaacaggatgccagatctccacccctcaatcacttacaaacacaaaagatggagtccaaacatgaagacctccgtcatcgcgaaactactccagcaagcacccctcagtcacgtccaaaactataacagaagtccctgaaatgaccccttcagatgcccctcaacactaaagaatggggactccaagcccaatggcctacccagtctataccaacagtacaggcaagcggagacccagaatatgaccctccccaactagagataagtggaaccccatccaataatccctccatcctctccccaaacaatacacagtaaggcctctatctgataaatgctcttgacccttcaacactagaaaaaaatggaagccccaggcactggccctccagttacctccaacatcagagacaatgaaagcttcgccaagtgattccccgtatcgctcctacattaatgatggaaactccaaaaaccaatcaaccctcaatcctctacacactcaagaaaggaactccaggctgggtatggtggctcacgcctgtaatcccagcactttgggaggccaaggcgggtggatcacgagatcaggagttcgagaccagcctgaccaatatggtgaaaccgtctctactaaaaatacaaaaattagccgggcgtggtgacacgtgcctgtagtcctagctactcaggagactgaggcaggagaatctcttgaacccgggaggcagagtttgcagtgagccaagatcacaccactgcgctcaagcctgggagacagagcaagattctgtctcaaaaaaaaaaaaaaaaaaaaaaagaactccagcaaatgccaccattcttacccactaccgctgcaacatgcatcccttgtcttcccaagactataaataagtatccccagcaatgacacccaaaacaagcaatggtcagaatctcaacaggcagccccccagattctacaacataagtgacaaactcataccccagaaaactatctctcttcccattatcccaaagtaagagttaatagaagcatcagcaagcaacacccttaacataaacgaggaggggagcccagaatgcaaatcccgtctcccccaacatgagttgactgcccctgcggtgacccctcctttatcccaaacacaaggaataatcttagccccagcaggcaactcctgcagcctccccttgcaatatgagtatctctaccctcacaatatagattgatagagccctatcaagccaagtgtcccctgctaggggaatgttgggtactccagtctcagaacatggaagacgatggtagtcctgacaagctggcaaatactctaagctcccataatacaggaggtgatacagcccagcaagcaaaccttccaacatttcctgcacccagcagacccttatcagctgcattcccagttgactctcagagcatctcctgctcgctcactagaagcaaagaaagactagagttgggggtaaggctgagaggaagagagaggggagaagggtaaaagaaagagaagagggggaaaggagaccttccaagttgttctaaacccggccatgaattccagatgcctcaaacagctacaatcagatcaggcactccagcacaaaaaaagagattccgggctgatgaaaagaggtggtctgaaggaaaggtgggtgtgttgactagccttcagaatgctcaccaaagacccttgccacctgatattcctgtcctgtgtaccccacctccaatattgaatcatacacgacccatatgatcaatacagcactgttgcatgtgacatctgaggctaggtcataagacacactgaagcttcctccttggtctcttctattgctctttctctaggagaagccatccgccatgccatgaggagactcaagcagccccgtaaccagtaaccaactcaccagcaccacattgctagccaggggatgagccaccttagatcttccagccccaaattttgaactctaattaatgatatgtaagctatctgcaacctacttcaaaatgcatttaaaaagatgaattgatggatgatacagagatgtatatgacaaagtatagtaaaatgttactgatgaatgttcctgtacattttttcaaaaattatttccatgcttgaacattgctcataataatttgttagtattcaagaactcctacgaagcagtaagagaaagaccaagagttaattagagaaaggagcaaatgctaacaacagttcacagaaatacaagtggctctcctaagaaaaatgggaagtaatacattgagattccctttttcattgatcaggaatttttttcttttaaaaagataacagattgaccaggatgtggagacactggcacctccatatcataatgacgggaactcaattagtgcaactcccccggactaagacaaggacccaaccagacccagagccacgccgagcccagggtgccatggggagacgcggaaagagccgaactgaagcggcgaaatcggagaaaactgaagccgggcggagaaagccgaactgaacgaactgagccgaggagcggcggagaagccaaggctgggcgaggggagccaaagacgggtggtgggagccgaggtcggccgagaggaaccggaaaagccaaggccaatgggaggagccgaggccaggcgggaggagccgagcagggccgaaaagcagcgggaagggcggcggagaagccgagccatggccaggacggagggaggggaagtttcaggtcggagacagagagggacaggcagcgccatggtaggacgccaggcgaggacggatggggaagccgaagctgggcggaaagagccgaagccaggcgcgaaggaagccgaagctgggcgggggaagccgaggctcggcggaagagccgaggccgggcgggaggatccgagctggaccgaaaagcggtggcactggcgccaagcgcgggaggtcgcggggcagagagggcgaagggagggtagcacctggggtgagggcgggcgggagagtcgagctgggcagaaagagcggaagccgagagcaagtgcggggttgagggcgggcgaaccgaggcagggccctggaagccgaggtccagcgggtggcggagagggtaaccgaggctgcgtgggaggagccgaggtcgggtgggagaagtcgaagccccggtcgaaggagctgatgccaagtgggaggagccagtgccgggtgggaggagctaagcgggcgaaaagcgctgaggttgagccgggacccatcttcttgggagcaggggaagggaggtcaggggactgcagtggggaaggggccgtggatggttgagcccgaagctgtcaacatggccagagtcatctgcagggcctcaaactgcctctgcaaaaattaataacagtgagaaaattatgacagtgaaagacacctgacccactccatctcgcctttaacctccaaactctcctcggtcattcctaggtgtgggccaagctaaccttgggagaaatttagttacagtttaaataacaatagcctttcctaaaactaaaccgccttataaaaataagagatcaccaagttatgattagagcagggcctgaattctgctcagatgtagacttcgttaaggattaccagcccttgctcaggtgatcacaagatttgtaacccttccaattactcctgtaaataacatcactattgtagaagctaagattggccttttgagatgtcatttaagacttttgggccaggcacagtggttcatgcctgtaatcccaccactttgggaggccgaggcgggtggatcacctgaggtcaggagtttgagactagcctggccaacatggtgaaaccccatctctactaaaaatacaaaattagccaggcatggtgatgcatgcctgtaatcccagctactcaggaggctgaggcacgagaatcgcttaaacctgggaggcggaggttgcagtgagccaagactgcgccactgcacttcagcctgggcaacagagcaagagactgttggggaccagcctcaacaccacccgtagggtactctaagtccggtggcgtcaaaggattgagaagagacaagttaaaggtggggagccaggggggccagatgcgaggtaggaggcggcaaaaggctcagagctctggtctccacactattgagtacaatcacttagatctgagaagcagatgttcagggcaaaacagtgaaagggaggcagtgcgtcatacgcgtaatctatagcaatagtggtttaaatgattctccgttgtgctcaaacaacatatctttaacttatcggagagtagctagtgggagcaggctttactaggagcctgcacgtctgtccacattccagtgtttcaaaggagtgtctttctccttgaacacagtgtttacagataagagagcaggtctcgctctgagcatgtgaacatgatggcaattaggaggctttcctcctcagaagccttttgtggctttccacaacttattgtcccatatttttatggccagtttatacaggcaccccacaagcccttttcccaacagagactctgtctaaataaataaataaataaataaataaataaataaataaataaagacttttgcatttctgacgaccggatgattcctgtggcccccacccagaaacaaactcagcacacaaggactgtttatttccacgcatcctggaccaattaacagcacctgttccctgcctccctgcccacgaaactatctttaaaaaaccctagcctccaaattttcaggttccccatttagccggccgtgcattttgtttgtttgtttgtattttctgagacggagtctcgctctgtcgcccaggctggagtgcagtggtgcaatctcggctcactgccagctccgcctcccggcttcatgacattctcctgcctcagcctcccgagtagctgggattacaggcgcccaccaccaagcccggctaattttttgtatttttagtagagacagggtttcgccgtgttagccaggatggtctcgatctcctgacctcatgatccgcccgcctcggcctcccaaagttctgggattacaggcgtgagccactgtgcccggccaatgtgcatgttttgaattctttctctattccaattctcctgccttgataaatcagctctatattgatgagtaagatgaacttctccggtggtttcaggtcctcctgccctcccggtcctgttgctccggccctgccaccgtcccctgcgagggctgctccatcggcaacagctgcatgttctctgcccccagtgaatgctcattggtgatatttgcatagggacaccccatcggcctgacagacagtttctctgaactgcgctgagacctggcccctcacctgtttatcctcacattggaattctgttttggtgtttgctttttggaggacttgcatgataacactgttttacgaatgaggaaactgaaacacgaaggcacagaggggttaagtaacttacctaaggttacgcagctggtaagggatttaaatgggatagtctcactgcagaatcagtacccttaaccatcgcgctatgagcgaaagagacaatgagagaaccaaatcaagataaaaaagaacatccttatcttgattttgtggtctccctgaactttttttttttttaatttgagacagagtttctctcttgttgtctaggctggagtgcagtggcgccatctcagctcactgcaacctccacctcctggattcaagcgattctcctgcctcagccttccaagtagctggggttacaggcaagcgccaccatgcctggctaatttttgtattttttagtagagacagggtttcaacatgttggccaggatggtctcgaactcgtgacctcaggtgatccacctgcctcaccctcccaaagtgctgggattataggcatgagccaccgtgcctagcctccctggcctctttcaatgaggagtttctaatactttcatccgtttttcccacggctgacacatctagagtgccgttctttttttatttcaaaatatgccctgaagatggcagtattgcaccaccctaaatccacaagctcttttccaaatgtttgccctgatgtccatcttctgaaaacaataatcaccaattagacatgtgagccaattagcattaactccttccatgaagaacaatgcaattgtctcctagagagcaactatacaatttattcactttgttttttgtttgttttgagatggagtcgtggtctgtcgcccaggctggagtgcagtggcgtgatctcagctcactgcagtctccacctccccggttcaaacaactctcctgcctcaggcccccttagtagctgggattacaggcatgtgccaccacgcccagctcttttttttttttttttttttgtatttttagtagagatggagtttctccatgttggtcaggctgatctcaaactcccgacctcaggtgatccgcccacctcggcctcccaaagtgttgggattacaggcatgagccaccgcgcccggccacaaatttttgtatttttagtagagatggggtttcaccatgttggccaggagggtctcaaacccctgacctcaggtgatccacacgcctcggcctcccaaagtgctgggattacaggcgtgagccaccgagcgtggccgtaaccaggctcaatgactttaactcttttcctcaatgattttcattcctcaatggctttaacctcttccaaatgattgcgctgatggctaacatatgtctgtcttctgaaaacaataatcaccaattaaacatgtgagccaattagcatttactccttccattaagaacaatacattggtctcctagaatgcaatttacaattactcactttgaacaagggaaatctcttcaactccacagacaagggagccactccctttctgatcacagattacagtgagcaatggaagtttcataatcgatggccttcactttcttctctggaatgtaaagttgactcagctgggaagaagcccataagaaaaaaagatcaatatgagacaaggagacttgtctgcagtatggcaggctaattatcttgaaaaacagtcctactacacaacatttaaaaagatgaatacacacctgtaatcccagcactttgggaggccaaggtgggctgatcacttgaggtcagcagtttgagaccagcctggccaacatggcaaaaccctgtctctgctaaaaattaaacaaaattagccgggcttggtggcacatgccagtagtcccagctactcgggaggctgaggcaggagaatcgcttgaacccaggaggcagagattgcaatgagccgagatcgtgccactgcactccaacctgggcaacaagggcgagactccatctcaaaaacaaaaaaagaatacaaggccgggtgcggtggctcatgcctgtaatcccagcactttgggaggccaaggcgggcagatcacctgaggtcgggagttcgagaccagcctgcccatcatggagaaaccttgtctctattgaaaataaaaaattagccgggcatggtggcacatgcctgtaatcccacctacttgggaggctgaggcaggagaatcacttgaacccaggaggcggaggtttcagtgagctgagattgctccattgcactccagcctgggcaacaagagcgaaactctatctcaaaagcaaacaaacaaaaatactccccagaaaaaccctatttccaaataaggccacattctgaggtcctggggactaagagttcaatatattggggttgcacagttgaattcatctcattgtttaggcacggggaccaacctgtcataccccatcaaccatcaaatgcggctgctctctgggaagggggaataaccttggacaaaatagctcccttaagcctgggaaagttccagaagagggactcagttgtccgcccccagaagacaactttcctggaagttggaagagtgagcacttggttctgaagaggtgatctgggtggtgcatgacagcatccacgacagtggatgtgccgtggctcttgctgcatccactacagcatccactacagcatccgctacctccacctcaatatccactacctccactacagcatccactacctccactacagcatctgctacctccactacagcatcatggatccaccacagcaatcaccacatccactacagcatccactacagaatccactacagtgactccaacacagtggcctcccactcctggggttatgcttcaggaaatgggtcagcaacctctaaggagcctggagatcaacagttgagaacattagaccatggactcatagtctaaaccacccaccaactatgtcagccctattaaaattatggcttccctcttttgtgaagtactttgaagatgttttctctcacttgtgtactatcctgatgaccactgtctcatctgtggtcatgcagaacacacatggagcagagccaaggccagaatttgcatttcctggctcccaagtctgactgtctcagcaacccacatccccattctaacccagagcccagccagagttcctcctctggttgtgaggctgtggtctatgaaaccaaagcctgtgccttgctttctcagcctgtcagggtcttaccactggataggagccttggatgaaaggacaggcagacagataaattgatggacagacaagaagagggatagatgatggatggatggatgaatggatggatggatggataggtggatggataaatggatggatgggtggatgaatggacaggtaggtggatagatgatgaatggatagacaagatggatatacagacaaatgggtgggtggatggatagaaaggaaggaaagaaggacagatagatggatgggtggatgaagagaaggcaatagacaaacatataggaaattacaaatacagatagataaaaaaaaaaaaggccccaagagaagtagaggtagaaacagaatggtagaaaagggggaggaggtcagagatatgagtgggaggaggaaggtgaaatgagagagaaagaaaagcaaagcccaaattatagtgtgacaggaagattgggtagcagaaatacacaagcaaaaaaagagaaacaagtgagaccaaaactggagaaataactcagagagagtgaccaagaaggagagaaactaaggaacacacacaagggaagcaaagggagagaagaaaaataagacaagagtgggaggaggagagggggaaatagagaaaaaaatgggaagacagaaaagtcctacatagaaggaaagacagagggaaagatggggtaaggagatacagaagtaatgtataaaagaaataaagtaggtcaggcgcacctgtggtcaggagttcgagaccagcctggccaacatggtgaaactccgtctctactaaaaatataaacaattagctgggcatagtggcaggtgcctgtaatcccagctactcagaaggccgaggcaggagaatcacttgaaccctggagggggaggttgcagtaagctgagattgtgccattgcactccagcctgagcaacaagagtgaaactctgtctcaaaaaaaaaaaaaaaaaaaagaaagaaagaaaaagaaagaaagaaagaaagtgagggaaccatggtgggtgcaagaggggagtagatggtgaggatggagagagaagggaaaaaaagaggagaagcacaaatgaagagaggcagaaacatggctgaccacaaagggaagcacacagaaggagaaagattaagagaataggagaaaagagcagaaggcagatacagaaaaagatggaggagaggatgaagcagacttgaaataaataaaacagagataaaagagtggcaagaagtagaaagtaggacagaaacaaggagggagcagggtgatgaagaaacaatcaagcaaacaaaaaaaaatcaaaacacaaggagaaacagtgagataaatacagagagaggaagggaattaaggggagaagtgaaaaggggaagccagggtggaggcagcaaagaagaggcccacactgaacaagatacaggaaagagagcagggaagagggaaagagaagaaagagaagtatttctttcttctagaagggtggaagaaggaggcagagatccaagggtagtagccagcactggaaatgatcctgaggcatcagataatgatgaagataatgatggtgatgataagaatggccatgatggcgatgatagtgatggtaatgagggtgatggtgatgagatggtgatgatgatgatggtgatgaagatggtaaggatggtgatgatgatgatggtgatggtgataggatggtgatgatggtgatggagatggtgatgatggagataatgatgatggtatagtgatggtgatggtgatggtgatgatgatggtgatgatggtgatgattatgatggtgatgatggtgatgatggtgatggtaatgatgatggtgaagatggtatggtgatggtgataatggtggtgatgatgatgatggtgatgatggtggcgatggtgatgatgatggtgatgaagatggtgatgatataatgatgatgagggtgatggtgacgatggtaatggtgatgaggatggtgatgatactgatgataatgatgaaggtatggtgatggtgatgatggtgatagtggtgatgatgttaatgatgatggtgatgatgacagtgatggagatgatgatgacgctataatgatgatgagggtgatgatggtaatgaagatggtgatgatggtgatgatagtgatgatgatgatggcagtgctgatgatggtgatgatgacagtgatggagatggtgatgatgatataatgataagggtgatgatggcgatggtgatgaggatggtgacggtgatgatagtgatgatgatgatgatggtatggtgacgatggtgatgaccgtgataatgatggtgatgatgatgatgacagtgatggatatggtgatgataatataatgatgatgagggtgatggtgatgatggtgaaggtgatgaggatggtgatgatggtgatgatggtgatgatactgatgatgatggtatggtgatgatggtgatgatactgacgatgatggtgatgacggtgataatgatgatggtgatgctgatgacagtgatggagatggtaatgatgatataatgatgagggtgatggtgatcacgatcatgatggtgatgatgatgatgatggtgataattatgatggtgatgatgttaatgctggtggaagcaacagctgacacatactaagtgcttactgtgtgccaggcaacttcttttaactgaggtataatttacatacaataaaagggataggttttaagcgtacagctcagtgaactgataaatgcatatacccatgtatttgctacctcagtcaaggtacagaacatgtccatcaccccagaaagttcccatgtacccctttcacaaccaagatcccgttacccccaccataggaaacccatgatctggtttctgtcaccatcaattactttagccatgccctgtgtaagtgctttacacacaccacaaatttattttatatcccgcaacacccgtaaggagcagggaccactgtcatccccatacacagggagattcgtacaactaatcataggagagccatggttcaaaatgaggcagagggcttccgggagctgacttgagccactaagacaaatataatattttgggggtcaggtgaagtaacctttccctctcaccctcttagagtctctgactgggactgacataagacagattaacaagataaatatacacatttcatttagttgaggatttttgtttagttttggggacagtgtctcactttgtcgcccaggctggaggacagtggcacaatcatagctcactgcagcctgcaattcctgggctcaaggagtcctcccacttcagtcctctgagcagctgggactacaggtgtgcaccactgtgcctggctaatttgtaaaatttttcgtagagatagggtctctctatgttgcccaggctggtcgtgaactcctggcctcaagtgatcctcctgccctgacctcccaaagtggtagaattacaggcctgggtcactatgcctggtctttatttagtaatttttacatgtgcaggggagattttgtaagaaaaacgaagacctaaagaagcagttggagctgaatgcttatgtactaggttggacaaaatatagtatggtagtttcatctcctgctttcaggaagaaaaaggaaagtcagagtgtccttcttgtttgctatttttcaagcacctttaactcaaaataaccaatgtgccaaagtggcatactttgttgttgtgaagtgttttttttttttttagacagagtctcgctctgtcatccaggcttgagtgcagtggcgtgatctcggctcactgcaacctccgcctcccgggttcaagtgattctcctgcctcctcctgagttcaagcgattctcctgcctcagcctcccaagtagctgggattacaggtgtgcaccaccacacccagctaatatttgtatttttattagagacagggtttcaccatgttggcctggctggtctcgaactcctgaccgcaggtgatccgcctgccttggcctcccaaagtgctgggattacaggtgtgagccactgtgcccggccaaaagtggcatactttggagtggcatatttggatcccttacacaggcaaaggcagaatggaagcaaagttcccgtgttcttgtcctgagtcagctgagtccagtgggggaaggggaagttgttaaaatgcaagttcccaggccctgccccatagatgctcatggaggaggcctgggtgtggcttagacagacacacctttgtttttaataagtgggattctgataagcacccaaggcccaggaggaagctccaggaacccagtgcagacactccccactccaggccagggcgccagctaccctgctaaaaggtgctgtgatcacttggccagggctttcaaggaatccaagtggctcctctgcacagagaccacacggccgtccaccctccctgagactgatgccttccttgatgagctttccttggaagaaaaacattttccattttccaagagactcacattgaatttcacaaacccagggaagcagaatttacgctgccaccacagccgataagcagtagcatcaatttcttggagaacagggaacttggagggacttggggatatgggaatgtccatcctgaagggagcatgagagatcaatgttacctcatttaatctttgccatggtcatataaggtaaggtctatcgtcaataataggagggtagggcctctgtgggccatgatcagcctgctagctggatggcagagaactgggagcagaaaggaggaggggagagagctggaatgaccattgggattccagagcccagggttaggaccaccgccctttgtaaaaccagccacttagccagttagttgctttgtgtgtcttcaggctaatttaacaaccccatactgcggaactctgggccagagtttggaggaatgtgaagaattcagacgcaactttcatgcagcctctggaaagctcccaggataatggggaaacacacacattcaataacctcaactttcgatggcccagctcagaacactgccagctggaggtaggtggtctggagaaatccagagaccgcctggaggggttggggattgagttccattgcctttgggagggagagagattccacagcccacatactttgcactttagctaaggtcaacccctccacctgtgccgtagatctcatcgtcacttgtttgcttaaggacatagagctagtgatcccctgccttcatctcttttccctctgatgactggattatccctgtcatcatccatactgctatttctcccatctcaaaaacaaggaataataataataataggatggtaaagtgagaactttacctttatattattattagtagtagtagtagtagtatttttttttttatttttgagacagagtctcactctgttgcccaggctggagtacagtggcatgatctcagatcactgcaacctctgcctcccaggttcaagcgattctcctgcctcagcctcccgagtagctgggactacaggcgcccgccaccacgcccagctaatttttgtgtttttagtagagacggggtttcaccatgttggccaggtgatctcctggccaaggtctcgatctcctgaccttgtgatcggcccgcctcagcctcctaaagtgctaggattacaggcatgagccaccgcgcccggcccacttttatattattaaaaaaatataataataatgataggagggtaaaggagtggaagattattgcaggattggactctagttggttcacatcaccttttatctgcatccttggacagtcctctccaaagctgactctgggtttggccatgggacttactttgggcaatgggacagtagcaaataccacacgagcagaagtttggaaaatatttacatttgggggctttttgttccttccgactgggtatccctgcaaccaccaccatatgaacaagcctgagtgaacctcctagaagacaagcaatcctggctctcccagcagaggcctcagcacaggagtgaggctgttcccggaagaaccacccaaccaacacatagaactgtaagaaacaggccaggcaccgtggctcatgcctgcaatcccagcactttgggaggccgaggcgggcagatcgcttgagaacagtagttcgagaccagcctgggcaacatggcgaaaacccgtctctactaaaaatacaaaaataatcatcataatgataataataaggctgggtgtggtggctcacacctgtaatctcagcactttgggaggctgaggcgggcggatcacctgaggtcaggagtttgagacgagtctggccaacatgatgaaactaaaaatacaaaattagctgggaatggtggtacacgcccgtaatcccagctacttgggaggctgaggcaggagaattgcttgaacccggagacagcgttgcagtgagctgagattgcaccactgtcctccagcctgggtgacagagtgagactccatttcaaaaaacaaactaacaaaaacaaaaacaaacaaacaaaaaaagaaaataaataaacagttgctgttttaagccactcaagaaagactattcaaaaggctttcaatcccatggtctaacccatggtcactcacctgtccacccaacctgggacaggtctccactcccaggatgacattgaaaatacttaacatatgagtttcccgcatgtcagaatagagcaagatcttgaaggttcattggtattctcggagtgaaccctttagtggttggaccatggggaggtctgggagcccttggggaagcgcttacttaccaaatggtatggaaatagtgcaatatttaaaccaccagtttggccatacaagtatgtccctacgagtcatcaactctgctggtagcaactatttaacctcccttttcatgtgtggaagaatctaggtgtttttctcctctaaaaaaaggcacctacatattccaagaggttttccttaacacagcccaactcatagccacatcccccgaccacacgacaggtccttaccgggacaccacacaaaaacaagcgtattctcagataatttaatcagaattttaatataaacaggtcattatcccatattttacatgcagaacgatttcaatattccaaaaaaaaaggcgtcttctgtacatggtgctacttggctcttgtaggaaaacattgaaaaaataataattgagctgttggggggttttgtgtttctgagttgttttctgcaaaagctgcagcacatttgatcctgcgttgccaacgcacagggccgaggccacccaggcacacaaagggacgaggagaagcaactttcaggcaaagtgtaaagactaaacaagctgttcctgaatatgtgcatgggtgcacacttattttgaggctcttccttccttctccaatgggaccaagagccccagatttgtgatctggtttttaacaaggattttcagtggcccgcacccagatagaaatttggctggtggctggttctggaccttgactagtatcagaaggtaaaagtaagctcaaaaagccattgtgtcccctcccctcactcccatttctcggggacccttaaggaaatattcaccttccattgcactccctgaaagtccaccatgttcttttgtatgttctaggaaaaaaaaaagtgctgacctgttcttttcattcccaacctcacctcgcatataaattaatattctgaagaacatgctggaagattttctgaagtgacacccctctctgtgtaccatgtatataaaatcggcattccctgttccccatcctcaacaaaaccattgtttctgaagagcctaaggtgtcaaggactcaccaggtgacattcaaaggacatttaaccctaaacttccacccactgtgaaggagagaaatgattagcactgggactacagcacatccatttaccggatgaccagcgcaagtcatatgctgatgacgctcctgctctttcacacgtgttacagcagactacaaataaacacctcccaatccaataagcacatttcttggtggactacctgccctgctaggatacagtgaaagatctgtctgtcagttggtaacatagtccccagggtcacaggatgacctatgcagacccttgtgtcagttcccacagcttctctcaatcatcctcagcctatatccagacaagcagcagtgcttctctttctcactgcttccaatgatgaaacagcacctaggacagctcctaaaacctgaacattttctgatgcgtatttgacatcactgatgcagagagaaagtgatgtgcttggtattctcctcctggaagaaggaactcctgtgtggctttcactacattaatgaaaagggttttaatcatagtgagacatctttaagaacaagcaacaaaaagtgttatcctaagctggttttgttgctttttgttgttgttgttgcaacttaacactacaaactcccaggacaaccgtgtctttctaggaccaaagttttattgttacaaagtcaacatttcctaatgtcaaaggaggtttgcaacccaatagctgtttgctcttttcactgtggcagtagagtcaaataaatgaaactggtgaatcccatttgcaaggggcaggcccagcacaccctacctttctccagggcaggtggagaaaggtgagtctgcaagggcagtgcctaaaagtacaagagcagcaagatttgggccccactggtcctgcctagactctcacatgggttatcaaagctgcacaaggtccaataatatcagcttgaggtcagtcaaaccccaacacagaggtccaaggtgttgttgcaaaaaaaaaaaaaaaaaaaaaaaaagcgttcagcacattaatgggttttggattggaatttccctcacatgctcccatcccacttggagaatttaaaaagacattgcattaggtgtttgtgtgtaaggtgcatcaccagcctgaaaggagtgggcataaaccatcagggagcccagggcacctttgtgctcacttcagggggattccatggaacaggtgggaatgcttgctctgaatcaaagcccgtctttgccccggcagccatctctcaccaaaggaaggtacaccttgctgggttaccccatatatcagatacatcatgacagcctggaacttagtttatgtttggggaacatagtgacaatagatggaggatttttttttaaaggaagattaaattcagagaagaatattaccagccaggaagaaaaggatctatgctcgcataaaggccataccttctccatcccaactccctccctcaaaattcttactggtccctggcattcgaatcagctgatacacacgttccctgattcagaccggttccaggtagaattctgaaatctcaaagatgtccatgattgaatcacatcttaacaatacactgaggtagactgtgctgaaaaaagaaaatcactatcccccattcacctgtttatttttctttgataaaaatttacatgcgctccattttttatgagagtgattttcagagtgattttatatattaaaataaatactttttcccctaatataagaaaaacctttctgaattagaaaaatgtgaaaattgcagctagtgtagtatacaaccactacaaatttactaagaagagaacaaaatacctagttctacgtgttttttttttaaatttaggtacagaccctcatatttacaaaataaatttggcaaaaataatttctgtactcttgcttcttgtacccaatcactgaggctcctcagcaatatttttacatgctgtattttcccgaatcatataaataagatagcaatagacaattgggattcatgtctacctgtgttcttaatcaagaattgagagggcttggaggttgccattatgactctatcccattcttaagcccacaactcttaagagaagaagaaaaggaagcagtcaaaaagttgtaagaaaatgcactcaggaataacgcatgggcgatgattttttgatgaaccaaagtgatgagttcactgtgttctttgagcagctgtggtggttctttttgcaaagagaagaaacggtggattcacgcccattcggaagttcttggtggtgtgtaaggtctttttcacggtttctcctccagactctactctcttagggattgcaacactgtaagcacctgagcattcagctcaggcaccacacctggcccagatgaggtcaccgggctcagagcagcttccgggagttcagtactgaggaccgtcagatgctctcagggtggaggggaccaagacgtactctcagtgcacctctctcttacattgcttagatgttcccaaagtccatccaggttgttgtgctttgggatctgacgttcttgggtttgcacaataacggttaggatgttcacacccgggagaggaaacgccacaagaggtacacacagagaatcagaggatgaacacaggtgttcttgaaggcaggctcagagctaggtagctaccagcttatccgaacaggaaccttccagcagacctggtacctgaaccagaccatccataaaacctagtctctcacacactccacgtggcctcacaacatccaaaagtgttagcagcgaacatggcttcattcccagaaatggatgcctttaagaccaaacaaagaggccacttgtgcctgactccctccccttcccggccccacaacaggcagaccaactcatgtccccactccccgccaaccccggggaatagtcaataacttatgaggctaataccagagactttaaaaattaaatatggtacaaatatattctcaaaactctgtcatctcagttctttttttttttcctttttccattttgttttttctttctttttctttttttttttttaatgtcctagcttggtttggtcttgaaaagattcataatcactccaaatgaaatgctcctcccttggccaccaatgtgaagggagggtagaaacctgaggctagacttctgacacaagaagaatctgtcgagagcacagtctcccagtcaataagaaggaaggagagagggggatgagctcgcacccttgagaagaaccttcatgagccaattcccaaagcatcaactccgcatggatactttgcacacacatcagccgtgtctaatggacacacacacgtgcatacacacgtgagcacacgccgggaccacagacccttatccaaaatatgaaagcagcagctattggtcaatttgaggaactcattttgtaaagaaaaaaaaaatccttcagcctggatgagagaaaaaaaaaaaaccaaaaaaaccatcttgaagctcaacctgtaaaacttgaaattctcctggaacagggctgggtgtttttgttttgttttttctttcgaacttttgttccacaaacaggaagttttgtcttttatactgaagctcagacaccagcaaaaaaaaaaaaaaaaaaaaagaatttgtaaaaacaggtgctttctttccatctgctgggggcgggtggggggaacgaaaaaacacaaaatcctggtttgaaaccgtcgttgccccaaaggagcagcaactgtggaaaccccttgccctccaggttcacagttaaatcctctgcaggactagttaaattggtaaccaaacgagtccaccttaagatgaacagaaatgtataggaacgatctctgaactccattggacatggtagagtcgtgagaatcctgagttttccagaggctttcaaaccagaggaaagcgaaaatgggaacccctgcccgcccccgccacggtaggcactgttaggaaggattggaccgaggcaaggtcagaatccgcccgtttttcttgcctccgttcatgtgtgtgtaagggatgtgttcctcgtagctccgcttgaaacccagcgaggaccctccatcccggccccccgcctcctccctctgacagtgcgaggaacggtccaggggcacattctccatgtcctcaaactccatctccagctcctcactctcgggagccttgttctcctcgctgtggaagaacgacacctctggaaagctggggtgcaggtcgtccttgagcaggttgacaatctccaggaaggttggcctcatcttggggttgaattgccagcacatgcgcatgaggtcagtgctgcggggcagaaggacacgtcctgggtgagtctgggggccctgccacgcatcctcccaaacccccactcttgtccctgcagccgacacccacggaccacatgtgctcacatcagatgctggctgtgtgtgtggacaattgtcaaggcagaaatagcattgctagaggtgctgagagatggtgttttctttttgcttttcttcttcttattttggacacagcgtctcattctgtcacccaggctggagtgcagtggcatgatcatagctcactgcagcctctgcctcctaggctcgagcaatcctctcaccttggcctcccaagtagctgggaccacaggtgtgcaccaccatgcctagctaatttttgtattttttgcagagacagggttttgctatgttgcccaggctggcctcaaactcctaggctcaaatgatccacccaccttggcctcccaaggtgctgggattacaggtgttagccaccatgcctggccgcttttttttttttttgagacagggtttctcactttgtcacccaggatggagtgcagtggcgcaatcatagctcattgcagccttgaactcctgggctcaagccatcctcctgcctcaacctcccaaagtgctgaggttccaggcatgagccatcctgtccagcctgaaagatggttttgaaaagggattcctcatttcaaaactggctcaagagtaatcccagcactttgggaggttgagccaggaggctgagtccaggagttcaaggttgcagtgagctgtgattgtgccactgcgctctaccagcctgggtgacacagcgagacttcatctaaatatatatatatgtacatatgcatatatatttggaggggggaatatataatatgtatgcctgacaaaatttttgtgtgtctgtgtttgtttttgagacagaatctcactctgtcacccatgctgcagtgcaatggtgcagtctctgctcactgcaacctctgcctccccgattcaagcaattctcctgcctcagcctcctgagtagctgggattacaggcgcccacgaccgcgcctgggtaatttttatatttttaatagaggcggggtttcaccatgttggccaggctggtcttgaactcctgaccttaggtgatcgttcacctcggtctcccaaattgcttgggattacaggcgtgagccacccatgcccagctacctgacaaaattttaagtgtataaagaattaacaggcggctgtaatcccagcactttgggaagccaaggtgggtggatcacgaggtcaggagatcgagaccacggtgaaaccccatttctactaaaaatacaaaaaaaaaaaaaaattagccaggcgcggtggtgggtgcctgtagtcctagctactcgggaggctgaggcaagagaatggtgtgaacccgggaggcggagcttgaagtcagccgagctcgcaccactgcactccagcctgggtgacagagcaagattccgtctcaaaaaaaaaaaaaaaaaaaaaaaaattaacaggcaaacaggtctctctcccccaaccccaggtctccagttcccttctcccaagataactaccgctataggtgttttgtgcaaccttccaaagatacaatatgcaagaaaatcatatgatttgtgaacacaagcaggcaggtaaagacataatatgtaaacatgtgtgcttataatatgtaaatgaggtgtacatgtgccatgatatgctgatgcacacagaaacatataatatgcaaacataaatacctatgtaaatatataatatgcaaacgtaagcgtacatgtagcacatatgggaactcaagtgtgtgtaccacaatgcaatatgcaaatgcaagcatgcatgtaaagacaagctatgcaaacacaaacacacctgtaacatacagcatgcaaacacggtgagcgtgtagacataggaaaggcaaaaccaagcacacgtgtaaagggcaataccctttcaacgaacacctcacacaccttaaaccctttctacacttacactctctctggacagttgtcgggttgatccagataccctccatccatgacaaatttcaacacctgttcattagacaggccttggtaaggctgttctgccaagctggtgatttcccaaaggaccacgccaaaggacctgccgatgacagttgatagtagtaacaaagaagccatttagacacacacacacacgcgcgcgcgcaaacacacacacgcaaacgcacacacacacgcaaacacacatgccaacacatacatgcaaacacacacatgcaaacacacacgcacatacacgtgcacacacatgcaaatacacacaaacacgcatgcgcacacatgcacacacaaatatgcaaacacacaaacacatatacacacacaaacacacacacccaaacacacacacgcacacacatgcaaacacacacaaacacacatatgcacacacatacacacacaaacacacacacaaacacatctcttggtttctagaacatggttagccacttaataaaacaattcatgctgcagttcataaatgctgtgaaaggaaaatcaatttggggctcccaaatcactaaactcaaggaaaaagtccagctaggaactgcttggacaaacctgcttcccattctattcagagtccccactctgctcactgagatacctgcatatctgattggctcctttggagaggcgcatcagaaactcaaaagaatgcaaccatttgtctcttatctacctacaacctggaagctccctccccacttcgagttgtctcgtctttccagaccgaaccaatgttcatcttatatatgttgactgatgtctcatgtctccctaaaatgtataaaaccaaactgtgctctgaccaccttgggcacctgtcctcaggaccacctgaggctgtgccacgggcacacgtcctcaaccttggcaaaataaacttcctaaattaactgagacctgtctcagattttcggggttcacaatgcctacaggattagtcaggacataagagtagccgtgggaagatcctaagacaggacgctgccttcctttccttgatggggcgtccaggaggatggcaggcttccttcccccgctcttggctctcactagcacctggaattcaagcccagcgtccatccacccatccacacacaactcaccacatgtcagaagaagtggtgaagaccccatccttcagggactccggtgccatccaccgtacagggagcagacccttgccccctttccggtagtaatccgtttcatagatgtctctggtcattccaaagtctgacaacacaaaaggttcacacgctcttaaccttcagccttggtcctagcatctgccaccttgactgccccacctctcacagagccctaagaggggttcacctggcccacgtctgcgctcacctgggtggtggccaaatccagtaagaatggattctgagggtacgcatggggaagtgaagggggaagatgggctactgtttaaagggagggaaaagaaggtaccaaatcacaaagaagctacatttttctttttttttttctttgatatggagcctcactctgtcctccaggctggagtgcagtggtgcaatcttggctcactgcaacctctacctccctgattcaagcaattctcttgcctcagcctcctgagtagctaggattacagctgtctgccaccatgtctagctaatgttttgtattttgagtagagacagggtttcaccgtgttgaccaggctggtctcgaactcctgatctcaggtaatctacccacctcagcctcccaaagtgctgggattacaggggtgagccaccgcacctggccaggagatgtctttttgagtcataaatagaatcatatcacttcctgctgccccttgctaatgtaagataatgtcgagatgacttgctgtgacacgcaaggtccttctgggtctggtttctgcctctctcctcatcctcacatctcacgctgctctggtcccctctatattccttttttatttgttttttgaaatagcgtctcactgtcacccaggctggagtgcagtgatgctgtcacagctcactgcagcctccacctcctgggctcaagcaatcctcccaccccagcctcctgagtagctgggaccacaggtgtgcaccaccacaccccactttttaaaaaatcttttcaaggagatggagtctcactatgttgcccaggctggtctcaaactcctggactcaagcagtctttacacattggacttccaaagcactgagattacaggcgggacccccggtcctacaaacatatcttttaaagaagtgaatgggtaagtgagtttatcaatacatgcaattaaatgacagctggtggggggtccccatccaaaatcttgcccagccaggcacagtggctcatgcctgtaatcccagtgctttgggaggccaacacaggtggatcatatgaggtcaggagtttgagaccatcttggccaacacagtgaaactccgtctctactaaaaatacaaaaagtagctgggtgtggtggcgcacgcctgtaatcctagctactcaggaggctgaggcaggagaatcgcttgaacccaagaggtggaggttcagtgagccgagatcctgtcactgcactccagcctgggcgacagagcaagactccatgtcagaaaaaagaaaaaaaaaaaaagccggtgcagtggctcacgcctgtaatcccagcactttgggaggccgaggcaggaggatcacgaggtcaggagatcaagactatcctggccaacatggatgaaaccccatctccactaaaaatacaaaaattagccaggcatggtggcgcacacctgtagtcccagctacttggaaggctgaggcaggtgaatcacttgaacctgggaggtggaggttgcagtgagctgagatcacaccactgcactccagcctgggcaacagacagagtaagactccgtctcaaaaacaaaaagacaaaacaaaacaaaaaaaaccccacaaaaaaaaaagaagtatcttgcccctttatattatcagaaaagacttaacggctcattatagacaacttccttctgaaatcaaacctggcctgggtcgttatgttttcaaagcagaaagccagacgaacctccaattttgacagtaaaatcatgggcgaccatgcagtttctcgctgccaggtcccgatgcacaaacttcttggcgttcaggtaggccatcccgtcagcaatctctgccgccatctgaatcatctcttgaagggtagggggagggcggccaggattattctaaaacagaaacacggggttggtgtttcagcagcactgggatccgaggaggccaggagcgggtgctccaccgagtaccccgctgggtcccccgaagcagcttacctcagcctctggccgcagagaacggaggtagctcttcaggtctccgtgagccatcagctccatcaccaccagcgtgggctggcccttggacaccactcccaggaggcgcacctgcagagcaagcaaccagggttcttggaggagggtccgtgattcgactcaccagggttctcctccctccctggtgtctatgtcacacacagcaccctgtggcctggatgcagcgtgctcagccctggtctaggagagcagacatacctgcccggacagcagacagataggcctttgtatttttttttttttaattttcgagacggaatcttgctgttacccaggctagagtgcagtggcgtgatctcggctcactgcaacctttgcctcccgggttcaagcaattctcctgcctcagtctcccgagtagctggggttacaggtgcccgcctccacacccggctaatttttgtatttttagtagagacaggatttctccatgttggtcaggctggtcttgaactcctgacctctggtgatccgcctgcctcagcctcccaaagtgctgggattatagccactgcacccagccaggcctttgtattttaatcattccctctgcctggctctctgttccctgccacatccacagggcccagctcctcatgtcctctaagtctttgctcaaatacacccctgtccaaccctcctttcctccctttcttcatgtttccatagcatttgctcctaatgtataaagggtttggagtcagctgggggtggtggcttatgcctgtaatcccagcactttgggaggctgaggccggtggatcacctgaattcaggagttcgagaccagcctggccaacatggcgaaaccccatctctactaaaaatacaaaaattagctgggtgtggtggtgggctcctgttatcccagctactcaggaggccgcggcaggagaattgcttgaacctgggaggcagaggttgcagtgagccgagattgtgccactgcactccactctgggcgacagagagagactctgtcttaaaaatatataaaaataggctgggcgtggtggctcacgcctgtaatcccagcactttgggaggccaaggcaggcggatcatgaggtcaggagatcgagaccatcctggctaacacagtgaaaccccgtctctactgaaaatacaaaaaaattagccaggcactgggcgtggtggctcacgcctgtaatcccagcactttgggaggccaaggcgggtggatcacgaggtcaggagttcaagaccagcctggccagcatggtgaaaccccgtctctaataaaaaaaagtataaaaagcattagctgggcgtggtggcaggcacctgcagtcccagctactcgggaggctgaggcaggataattgcttgaatccagcaggcagaggttgcagtgagctgagatcatgccactgcactccagcctgggtgacagagtgagactccatctcaaaaaaaaaaaaaaaaaacaatcagccaggcgtggtagcaggcgcctgtagtcccagctactcgggaggctgaggcaggagaatagtgtgaatccaggaggtggagcttgcagtgagctgagattgtgccactgcactccagcctgcacaacaaagcgagactccgtttcaggaaaaaaaaaaaaaaaaaaaaaaaaaaaaaaaaaaaaaaaaaaaaaaaatatatatatatatatatatatatatatatatatatatatatatatatatgaaataaaataaaaataaaggttttggagtctgtctccgcctgctgttttggaagctctacaggggcaggtatccactgtatcacagggacaagagcagggctttaaatgccccataaatatgtgtggcaaggatgaaagcacataggactcaaagaggaacaaaggagcagaaaggcaggaagagttggtgctgccttcaaaggagagtaggaacgagggcaggtggtatcaggtggacctctatgtggtcctgggttacaaaggtgccaggaaaaagcaagaaatggaagagtctaaaaagcaatggaagattgtggaaaatgatggaagattccggaaagtggtggaagattccagaaaatgatggaagattccagaaagtgatgaaagattctggaaagcaatgaaacattccagaaagtgatgagacagtgatagagtctggttccaggcgaagtgggagaggatgggatttgagaagggaatgatccctcctcacacctctaggatgggaagcttagtggagtgaggggtgggtaggaggttacaccctgtgtcctctgtcgctctgtgcaggaggaggaggcagagaaagggaagggtcaggaaagccagcccatgtcccacccccactggactcaccacgtgatggcaggtgaagcccttcatgaccgaggcctcattgaggaactcaatccgctctcggagactggctgactcgttgaccgtcttcaccgccacgcgggtctctgcctcacccttgatgatgtccctggcattgccctcatacaccatgccgaaggagccctgccccagctctcgaaggagggtgatcttctctcgagacacctcccactcgtccggcacgtacacagagcatggaaacactacttcttacttatctacacagcatccttggaggatcccttgggggtctgcagccaccttccacccaagccctcacccaaaccccctcgaaaacactcatgaaatgagttctgtgatccaggacccatgccgggcactgggcatatggccgagaacaggacaggcatctgcacccatggagagggcatggcagagactcaaggaaggagccacaactggtccaagatcctggccaatatgtcctgaggcaaacctgcatccccatccttcttgtctgatttcagacccttgctatggaatgatgctacttcccacctgagactactgtttctgcaaagtgccaaggggatggaagacaggttgtaataggttggggaaaaaaaaagccaggatacttggagctcttcccatgaaaaggtggagtctatctcaccaccccttggccctgggcatggccttgtgagttattttggtcaatgggaatcaacaagaattgtccaagcagagatttggaatggactgttgccctggagcttgccctggagctttctactaggaaccaacagaggaccatggaatgaagcctgagccagcctgctggagcctaagaggctagatggacagagtgaggctcagcctcccccagcttagggcccccaccttgggaccacccagcctactgaccaccagacatgtgagtgaaatcatctaagactaccgagtgctagctgacacaccagcaaaatgtagctacatgggtgaagccaggcaagaccagaagaactgcccagctgagcccagcccaagtggtcgaccctgcccaagggtcccagaccggctagatgagcccattcaggcaggtgccaaataccatgtgtccagatgcacacagtaatgaggtttctgcagcaagggcagtttggcaagctcaaatgaataagagggcttttcttggcctccctggggaacccatccttcactctcactcaatggtgaaggcaaaggaagctgatgagtagggttctggccacccacagggaagggatggtactcaccatcactggcactgagatactcagggtttgaagaagcgtaaagcggtcccagcggcccatctggctgcctggaggaggaaaacgaggcacgttagcttgagattctcatgggactctgcagaaaggtgtttcatacaagactccccaaggcaaatggcagcccttaccagcagaatccccataatcctagatgcagtctagggcagggatgggggacctttatgttttgaatggaagcccatcagacaggtatgtaagtgcatcaacatgggagcactcatccctccctgggtggttttttttttgttttgtttttgtttttgtttttacatttcagagttgcagtcttgctctgttgtggctggagggcagtggtataatcatagctcactgcagtcttaaccttctgggctccagagatcctcccacttcagctttctgaatagctgggaatacaggtgctcaccaccacacctggctaatttgtaaaatttcatatagacagggtctcactatgttgcccaggctggtcttgaactcttggtctcaagtgatcctcctgcctcatcctcccgagcggctgggactacagatatgcacgaccatgcagggctctggctggctttttaaataatttatggccatccatgtaacacttaaaagccactcacccagtactgttctagagcgagctcatcccgactgatgagaaacaattattaaattttcaggaaactagtgagccagttgttaaatacaagcatcattaaagattaaattgtacaatgccttccaaatagaacaaaaaatataaattatagaggcttacaattaaataaattatcctaaaagcaaagacaatacatgttcaaaactcatcacttcctaactctcatactacatttaaatatgatcaatgcagttgaggttatttacattatatcatttatacaccatattgtatccatagggtggattcaatggggagctattatgtatctctttctaacactgcactcagtaatattatgtctacagcttgaatttagacatcctgggaatatttacattacagaaactggcaaatgctataactcaggactggatttgttgttctgttgtttgtccaggcttgagaaagtgatgagaaaaatatttttttgttttgttttgtttttgagacaaagtctcactctgttgcccaggctggagtgcaatggtgcgatctcggctcactgcaacctctgcctcctgggttcaagcgattctcctgcctcagcctcctgagaagctgggattacaggcgcacatcaccacaccttgctaatttttgtatttttagtagagacggggtttcaccatgttggtcaggctggtctcgaactcctgacctcatgatccgcccgcctcggcctcccaaagtgttgggattacaggtgtgagccaccgtgcccagctgagaaaaatgtttaatcatgtagattaaacttaaaagcgtgtcatgtctgcaactgtgatgttgcatgtggcacaaaatgttcttctgatatttaaaaattaccatctgactcagcaaagacgtcactcatatcactgatgaacatatatgtcttatttcagttttgtcctactttttttttttttcccgagacggagtctccctctgtcgcccaggctagaatgcaatggtgcgatttcagctcactgcaacctccgccaccagggttcagtaattctcctgcctcagcctcctgagtagctgggattacaggcgcccaccaccatgcccggttaattttttagtatttttagtagagacgaggtttcaccatgttggccaggctggtctcaaactcctgacctcaggtgattcacccgccttggcctcccaaagtgctagcattacaggtgtgagccactgtgcccagtcaagtcctactccttaatgtaaattttgaaaaattaatcaacattcacattggagctttacttgtttatcaattgcaataataggttagcttcggatataaaggtttgggcaaaaaaaaaaatcaataaaaacattctgtgagaatcaactgtctagagggaatttacaataaagagttgtgtatatcatattatgacaattatctgtaaattgcatgttacacatcctatatcagcaaaattcataataaacttaaatatgcctatacctatatcaaggcatgttttcccccagagaaccaactgttcccagcacaccactgaactcactgaactcacctctttctcaggaatagataaatacttccaatcacaacactgaagagaaagacaaagatgagggggccgatgataatttttgcaatatttgacgggacgtctactgaaatagaataagaaaatatatgtttcatatcaatgtgtttccaacaaagttcacatcaaaaatcacatccactcctggaatgggtgggccaccctgttccttccctcccttgtccataaacctctctgctgctcttccacatcctgattttccagcagtcccgaaacagtcccgtaggtgcagtgggaccaggcagtgggctcagaggtcagtattctggaagcacactcttccccacccctgccccaaatcactgctcatttccatccctcccacatctcaggcagtggatgcaggacccttttctgtcagtttaatgctctgctgttgcccctctgaaatgcttattcattttattttaatttttatttatttacttatttttgtgacagagtcttgctctgacacccaggctagagttcagtggcacgatctcggctcactggaacctcctcctttcgggttcaagtgattctcctgcctcagcctcccaagtagctgggactacaggcatgcaccaccacacccggctaatttttgtatttttaatagagacagggtttcaccttgctggccaggctggcctcaaactcctgacctcaggtgatcctcccgcctcagcctccgaaagtactgggatgacaggcgtgagccaacgtgcccggccaaattcttaataattttaaagcaaggagttctgcattttcattgttcactgggtcttgcaaattacatagctagtcccgatcccagcatgacttttgacagatgtaaacttcttttaatttttattttttagagacagggtcttactctgtcacccaggctggagtacagtggcacaatcacagttcaccgcaacctcaaattcctgggcccaagtgatccccctgtctcagcctcccaagtacctgggattacaagcatgcaccaccatagctggctaatttttgtatttttttgtggagacagagtctcgctatgttgctcaggctggtctctaatgcctgtcctcaagcaatcctgttgcctcagcctcccaaagttctgggattacaggtgtgagccacctcatctagccaaaaaactctagtaacaaagatggagacactagcaacaggtgccaggcacttaacatttgtgtcattaaaatgtccctccacctcctgaagtggttctgttattatctccatgtacagatgaggaagtgcaggattgccagataaagaaaatgtgatacatacacaccatggaatactacacagccatgaaaaagaatgagatcatgttctttgcagcaacatgaatggagctggaggtgattatcctaactgaattaacacagggacagaaaaccaactacctcatgttctcacccataagtgagagtgagacactgaccacacatggacagaaagaagtgaacagtagacaccgggactgctatggtttggatctgtgtccccacccaaagctcttgttgaaatgtaatccccaatgttggaggagtggccgggtgggaggtgattggatcatggaggcggtttctaatgggttagcaacatccctactgggtactgtataataagtgggttctcatgggatctggttgtttaagaagtgtgtagcaccatctccccgtcttaacaccttgctcccacttcaccttccaccatgattgaaagtttcttgaggcttcctcagaagctgagcagatgccagcatcatggttcctgtactgcctgcagaactgggagccaattaaacctcttttctttataaattactgagtcccagtctcagacctcttcctcttcctctctctcttctcttctttctttttctttcttttatctctctttttctctctttctttccttttctttctttttctttttcttctctctctctttcactctttctttcttttttattttttgagacagagtctcactctgtcacccaggctggagtgcagtggcgtgatgtcggctcactgcaacctccgcctcccgggttcaagtgattctcctgcctcagcctcctgagtagctgggactgcgggtgcacaccactatgcccagctaatttttgtatttttgggtagagatggggtttcaccatgttggtcaggctggtctcgaactcctgacctcaagtgatccgcccacctcggcctcccaaagtgctgggattacaggtgtgagccactgtgcccggccaggtatttctttattgcagtgtaagtacagactaacacaggtgcctacttgagagtggtgggtgagaagagggaaaggatcaaaaaacgacctatcaggtactatgctgattacatgggtgacaaaattatctgtacagcaaacccccaacaacacccaatttacttattttattttattttttgagacagagtctcactgtgttgcccaggctggagtgcagtggcacgatctcggttcactgcaagctctgcttcccgggttcctgaggctcctgcctcagcctcctgagtagctgggactacaggcgcccgccaccatgcctggctaatttatttttgtatttttagtagagatggggtttcaccatgttggccaggatggtctcgatctcctgaccttgtgatctgcccgcctcggcctcccaaagtgctgggattacaggtgtgagccaccgtgcccagccacaatttacttatataatgaactgcacaggtacctctgaaacttttttttttttttttaagtgcaggatcaggccaggcatggtggctcatgcctgtaattccagcactttgggaggccgaggcgggtggatcacttgaggtcaggagtttgagaccagcctggccaacatggtgaaatgccatctctactaaaaatacaagaattagccgggcgtggtggtgggcacctgtagtcccagctactgtgaggctgaggtgggagaatcacttgaacccgggaggcggaggctacagtgagctgagattgtgccagtgcactccaaagcaagcctccatctcaaaaaaaaaaaaagtgcaggatcaaagagggcaagcaccgcagcagctgataggcctgagagtcaaggccagggccagcacctgcggcctctccaagtcatcccctgcaatgtcccaccatgctcagtgctaagcacagccccagtcagctgaggctgccatggagacttacaatagtctgtcacgtagaaataggtgggttccgtccaagagccgttgcccgcaagggaggtggcccggattcgcacgctgtagttccccggtgacagcccacgcagcctgcagccccgttccagagcgaagtgcttgcgggagacgcagagatgcagctcctgggaggaagagaggaggagaaggagggtggctgagctttgcacatctgggagtgtccacccctcgcagggagctcacagccaggatcctgctcagaaatgacgccaaggcagcaaagcacagactaagacacataagcgactttgagaattgcagaattttataaccatagtgctatggataaagatatatgcagaggttatcattatcggtaagagccagacttcctaagccagaagctgagcattaaaccctgatggtttcttttcttttccttttttttttttttccagacggagtttcactcttgttgcccaggctggagcgcaatggcttaatctcggctcactgcaacctctgcctcccgggttcaagtgattctcctgcctcagcctcccgagtagctgggattacaggcgctcaccaccgcgcctgcctaattttgtattttcagtaaagacagggttttaccatgttggccaggctggtctcaaactcctgacctcaagtgatccgcccacctcggcctcccaaagtgctgagattacaggcgtgagccacagctcccagccctattatctattttctattaatattaatttccataatattatctttctaaaaatcatttgttttatttttaattgacaacagtattataggtcaggcacagtggctcgtgcctgtaatcccagccctatgggaggccgtgaagggaggattgctggagcccaggagttagagaccaacctgggcaacatagccagaccccatttccacagaaaatagaacaattagccgggcacgatggttcgcacctgtagtcccagctactcaggaggctaaggcggaagaatcacttgagcccaggaggtcaagggtgcagtgagctatgaaggctccaccgtactccagcctgggtgacagagctagaccctgtctctaaaataaataaacaaaaataaaaataatagttgtgtacacgtatggggtacagtgtaaagttatgttacagtataaattgtggaatgattaaaacaagctaattaaatcctcatcacttcatgtacttatttctttgttgtgagaacatttaaaatctattcttctagccattttgcaatatgtgttattagctatagtcaccattcatctacagagcagtggattcctagaacgtattcctcccatctgaaactttgcaccctttggttcacgtctctccttgtttttcctttaatcattttaaaatgcaaaagtgggcagggcgtggtggctcatgcctgtaatcccaatactttgggaggccgaggtgggcggatcacctgaggtcaggagttcgagaccagcctggtcaagatggtgaaacccccacctctacccaaaatacaaaaattagctgggcatggcggcacacgcctgtaatcccagctacttggagggtgagacaggagaattacttgaacccaggaggtggaggttgcagtgagccaagattgtgccactgcactccagcctgggtgacagagcaagactccatctcaaaaataaatacataaataaataaaatgcaaaagtgactcctagctcacaaatcattagaaatcaggcagcaggccacatttagcctatgggatatagcttactgactgacccctggtttaagagattatatggtttgtccgagatctcatagctgcaaagtggcagggccagctcttgaactcagaactgtctggctctacagctacttgggaggctgaggcaggagaatggcgtgaacccgggaggcggagcttgtagtgagccgagatcgcgccacttaagtccagcctgggtgacagagcaagactccatctcaaaaaaaataaataaataaaaagaaagaaactaaaaaaagagaactgtctggctctagaacttctccttaagaccactgcagaatatttttgccatgtatccagcaaaattagaaaagagtggaaatgaaggatctgcagggcctatgccagatttcctgcctttccctgcaactcccagcctctgtcacatcagaaccaaatggataaatgtgcttaatgtctaaggacaaataaaaaagctctttctttgccacggtgctgcctttcgatttttttttttttaatcattataaaaacagttgaagcccgggcacggtggctcatgcctgtaattccagcactttcaggggccaaggcgggcagatcacgaggtcaagagattgagaccatccttgccaacatggtgaaaccccgtctccactaaaaatacaaaaattagccagttgtggtggtgtgcgcctgtaatcccagctactcgagaggctgaggcaggagaatcacttgaacccgggaggcagagtttgtagtgagtcgagatcgtgacactgcactccagcctgggcaacagagcaagactgtctcaaaaagaaaaagaaaatgtggtatactttgcctcaaaaataaacacataaaataaaataataaataaataaataaaacagttgggatccacccaaatggagatttgcaaagtgggaaacataccctgtgataagcacgtaactagagataattccagaacttatgagaagagacaggaggctcttgggaataagaccatgaaacctgcaagcatcgagcccaaaactctgaaaagttttcgacacagttccaagctaatagtgcatgcagagaaccgggctggaacatttaggaggggggtggagagtggagaagagaaagaaatgttaaaaaaaaaaaaaaaaaaaaagccaacaaccccatgcttatcgtgtgacaataacagcaagaaaacaaatcagtctggtggcaggggtgggggcagggaactccagtccaaagtttcttccaagtggaatgagtcaccgagtagagagggacaaataagcaaatatagaaacccaaggtagctgctatccaggacaaaggggaaatgcatcttctttttttttttttttttttttttttttggagacggagtttcgctcttgtcacccaggctggagtgcagtggcatgatcttggctcactgcgacctccgcctcccgagttcaagcgattctcctgcctcagcctcctgagtaactgggattataggcgtgtgccacaaagcgagactccagcctgggcaacaaagcaagactctgtttgaaaaaaaaaaaaaaattatctgggcatggtggcggatggcgggcctgggtgacacaccatgactctgtctctgaaaaaaaaaatttttttaacgggagatactgaaaatgcaattaaatagctagaggtggctttgtttatgaaactagcaaaagaaaaaaaaaataccttccaccagctgggcacggtggttcacgcctataatcccagcactttggaaggccgaggcgggcagatcacgaggtcaggagtttgagaccagcctgaccaacatggtgaaacctcgtctctactaaaagacaaaaattagccgggcgaggtcgtgggttcctgtagtcccagatactcaagaggctgagggaggagaatcacttgaacccaggaagcggaggttgcagtgagccaagatcgtaccaatgcaccgtagcctgggctacagagatagactccatctcaaaaaaaaaaaagaaagaatgaaagaaatgccaaactctttcctaaagcagctgtgccattttatgttcccaccagcaatgtatgagggttccgatttctcctcatcctcaccgacacttgttattgtccgtctgtttgttttttgccacgctcgtgggcatgaagtggtattgcatcgtggtcttgatttgcatttttgtcatggctaatttggggctgagttttgtgttttgccctggtaccaggctggggttgagagtgggaggtgagagccactcaagggtgaggagcagattccagaggaagttcggggcattgttgacagcaagaatacagattctgcagagtgaacaatgcccgtttccactgcagaccctccttgattttttttctgcttctgtgtccaacttgtccccatttgcccagaactttctgagtgtggacattgaaaatctcacatcccagggagccctcagtcctggctaaacctagacaactggtcaccctgttggcactggatttaactcgaatcctaacttctcctagcttcttcccatgcctttgactggcccgtgtctcctgttcctgggacccaagggtcactattaggaattcccatcacgaatccccaacagcctctgccccacacagcacaaccccaatcccacccagaccaactgtgttcaccctagagagaagcagagatgggggagaaaatgaaaggagaatgtgaggttacagtcaccttcttaagaaccttttcatagacacatttctgttattgccaacaatgtccttaattacctagcattgctttgatcaagaaaaaaagtgatgtaaaactttatttatttatttacatatatatatatatatatattgagatggtgtctcactctgtcacccaggctggagtgcagtggtgtgatctcggaatcactgcaacctctgcctcccgggttcaagtgattctcttgtcttagcctcccgagtagttgggattacaggcgtgcaccaccacgcccggctaatttttgtatttttagtagatacgaagtttcaccatgctggccaggctggtcttgaaccctgacctcaggtgatccacccaccatggcctctgaaggtactaggattacaggcgtgagccactgctcctggcctaaaactttatttttatgtgcacaatttatactgttggagtgtaattttactccatttacaaaattctctctagcatgtggtgggagtgaatattatggtatgtaagttacagctcaataaagctgtttctaaattaaaaaaaaaaaaaaaatccctcatgcccaagccaatcagcatacagcattcctctggtcacatgattgggcactggatgtcacatgacctcagtctagctgggaatgctgggatgcactctgtcttcctctgggtttggcactgcaaagaaatgaggtttggaaccactacaaccaccggtggacaaccaggggctactgggctcactgccaggagccgttaagatgcaactgacccaggctaggcatggtggctcacgcctgtaatcccagcactttgggatgccaaggtgggtggattacctgaggttaagagctcgagaccagccaggccaacatggtgaaacctcgtctccattaaaaatacaaatattagctgggtgtggtcgtgggtgcctgtaatcccagctactcaggaggctgaggcaggagaatcgcttaaacagggaggcagaggttgcagtgagctgagactgcaccactgcactccagcccggatgacaggatgacagagtgagtgagactccatctcaaaaaaaaaaaaaaaaaaaaaaaaaagatgcaaccgacccaaaggaatcctggatccagccatgtgagaagctcttcagttgttcaactctgggagctaagaagcttttcctctatcataagctagtctggatacagggggattcctttttcttcttttttctttttctttttttttttttttgagatggagtctcactctgtcgcccaggctggagtgcagtggcgtgatctcggctcactgcaagctccacctcctgggttcacgccattctcctgcctcagcctcccaagtagttgggactacaggcgcccgccaccatgcccggctaatttttttgtatttttagtagagacggggtttcaccgtgttagccaggatggtctcgatctcctgacctcatgatccacccgcctcagcctcccaaagtgctgggattacaggcgtgagccactgcacccagcagatacagggggattcttaactgctgggggataacaacacaaacgaactaaactccagagcatgtaattttaacttctacattacactgaacaaaggtcatcccaaacattttatcttatttttttggagacagagtcttcttgctctgtcacccagtctgcagtgtagtgagtgagtcacagcccactataacctggagctcctgagctcaagcaattctctcctcagcctcccaagtagatgggactacaggcatagaccaccacacctagctaattttgaaattttttttttgcagagatggggtctggctgtgttgcccaggctcaaactcctggcctcaagcaatcctcccacctcagcttcctgagtcactggaattacaggcatgagccaccatgcttggcccccaaacatcattttcaatggctcttcatccaccaattctatggatgcaccgtcttccatgtgtccattctccaatggatggacatcttagtggtttgcatattttgctactgatgaaaatcttatgcatagagctttgttccctgccccaaatttgaattatttccttaggacctacaggattaatacatataggataatatattaataaactttgcaattatggcccccagggaatcatgactttctgtgtctatgagactctggaagcctcagtatccagctcactgagatactcagaggatgtattgtacttcctcattctgggcttagccatgggctcactttgccaaagggacactagcaaatgtgatgcaaacagagtcctaagaagtgtttgtatatggggcatgtccttccttgcctgggctagctcactgggcagtgagagaacacatgaggacaaagctccaagtgcccccagctgaggccccagccatgtgaatgaggccatccagccccagccaaactggcccaggacaaaggaatcacccagtgaacctgcagaattgagagaaagaataaatgtcctttgttttaaaccagtacctttgggggcagtttgttacgcagcaagaactgactgaaacaataactaaagctgtcaatccaaaaagctaaaatggtttccagataaaattagtattacctaacatggtaaaaaccagaggcaatccaaatccccaaaaataaatgataccccaatcatgagattaaattctatctagcaactacaaatcataattccaaaggctattgtggacagagacatcaaaaggcagaggaaagtaactcatgaatatggattagaggcatatgcacgtttctgccaattaaaaactagctgagctctgtatgataaggaattttattttaaaaatgaatattaaaaaaggcaaatcaagccattcatttagcaattttattttaaaaatgaatgttaaaaaaggcaaatcaagccattcatttagcaaacagggccccaaaataggcccagaatgacaagttcagtaaggacactttctatttttgaaagtttactttttctgtgaagctgtgaagggccacatatagtctctgttgcgtattcttttttttttttttttttttgagacagagtcttgttctgtcgcccaggctggagtgcagtggcacgatcttggctcactgcaacctttgcgtcccgggttcaagcaattctccctgcttcagcatcccgaggagcagctgggattataggcgcccaccattacgtccagctaatttctgtatttttagcagagacggagtttcgccatgttggccaggctggtcttgaactcctgacctcaaccctgttgcacattctttacaatgctctgcaagccagatttggcccacaagccacaataatttagaattagatctcaattgtaaattattgtcaaagccaaaatctttggttgccaagagtagatgtggtcccaggaggggtagagggaggtccacctggttataggaggactccctctcaaagttccaggaaatcagacattttgctgtaatctctgttagttgttggcaaactctggcccaccaactaaacctggtccaccacgtgtttttgtaaataaagttttattggtacacaaccacatccattcatttacatatcacccatggcagctttctcagtagaatggtggaattgagtagttgtaacagaaatcatctggccacggagtcaaacatgtttactatccagacctttatggtaaaaaaaatttggcagtttctggattgaaatatcagtcatgcatttggatcatgattctattcttccaggttttgtgcagcaacttaaactctggaagcctcagtacccagctcactgggataatgtgaggacgtattgtacttcctcagtcccaagaggtatattatttttgcattttggcatttctgaaattggaatgcatcttacaagcaatgcattttacaaacacttaacagtactcaggatctatattctacgaaaaaaataaaattagaattaacggccctttttttttttttgcctagctgtccataaaaataatggggcctctcaaaatttcctagaggtaataaaatgtgatcaatgagatactctgtgtaacgtgctgaatgtgtttgggacatacagtgagccctgggaagagcttagcaactgtttgggttcttttgggttatttgtcttggattctatgtcttgtgcatctctgcactcacccagcaccttgcatggtgtctggctcaatggaagcatctaatgaaagtaacttataaggtttttgttgttgctgtttttgagacagagtctcactctgtcacccaggctggagcgcaatggtgcaatctctgctcactgcaacctccacctcctggcttcaagtgattctcctgcctcagcttcccaccttggcctcctgagtagctgggattacaggcacccaccaccacgcctggctaatttttgtatttttgtagagatggggtttcaccatgttggccaggctggtctcaaactcctggcctcaagtgatctgcctgcctcggcctcccaaagtgcttggattacaggtgtgagccactgtacccagcaatttataaggttttaagactcaaataactccttctaaagtgaaatgagtctcctgttgtggtgggaggcagacatcattcaacttagaggacacagctggaaagcaatgtgagaaactaagaaaagtaacaagctggtagattggcatttctgacccatcttcctgcgaagtcaggtatcaaggctttaagtactaatagcacagtacctgatgagagaagcactggaatcaaaatttcagcagaggaaggaggtaccaagtgcaactctgaaggggcatgctgaagtgtgcaggggcatgcccaagagtcaagggccttacctcatcaccatatcgccgataactcacttcatacagcacgatcagaccattgggctccttcggctcctgccacatcaagtggacgacgttgttctcaaagatttcatgcgtcacagggccaacaatgtcatcagccttggctgtaaggagaggaagtgagaggcagggatgtaactcttggatgagatcccacttctgccacctgtccatggtgcaaccttgggctggtgacgtcattttcccacaacccattttcctcgtcagagaacggacatctaaaactcatcccacaagattgttaggaagattaaatgggttactttctgcgtataacttttttttttttttgagacagagtcttgctctgtcacccaggcgggagtgcagtggtgtattttctaaagtttacataatgattgcctatgactcataattttaaaatatgacctggcatggtggctcatgcctgtaatcccagcactttgggagctcaaggttggcggaccacttgagctcaggcattggagaccagcctgggcaacatggtggaaccatctctactgaaaatacaggtgtggtggcacacgcatgtagtcccagctactcaggaggctgaggcaggagaattgcttgaaccagggaggcggagattgcagtgagccaagattgcgccattgtactccagcctgggcgacagagcaagacttcatctcaaaaaaaaaaaaaaaaaaaaaaaaggccaggttcggtgctcatgcctgtaatcccagcactttgagaggccgatgtgggtggatcacttgagcccaggagttcaagaccagcctgggcaatatggtgaaaccccatctctactaaaaatacaaaaattagctgggcgtggtggcagacacctgtagtcccagctacttgggaggctgaagcagggaatcacttgacataggtggcagaggctggagtgagctgaggtcgcaccactgtactccagcctgggcgacagagcaaggctccgtctcaaacaaaaatgaaggccaataaggtaaaatacagatatgcactgcttagagggtggagaatctgtccttggtcagccttgatgtcccacccatgacactcggaccccggagcagcagccctaccttcaggcatggtcctcgcactgacgtaggctgccacactgcaccgttcctcaggggtgtcctggttgcaagcctgcagctcgatgcgatagcccgtgaagtgtcgcaagccggagatgaccagcgactccttgttcaccaccttctcaaaaggcctgtgctcctccggactcgtgggcacgctggtcgaggaagtgttggggaaagctgccaccgtgggcacggccaccgtcacattcccaacatcgccaagggacctgcgtttccgagatggcctggaacgacagtaggacatgtatgatgacaccatcaccatcattttttttaaaaaagtgacactggagaataaaaggcttgattaagaagaaagatcagagcgcaggagggtgcagcaatggggaacatggattacaatacagactgccaggaatgaccactcagagcagctttcaatatacccttgtgagcatctgaaggattagagcaggcccacctcgtgagggatgagtgcttctaagaccgtcaatggtagacacacaccgatattcccctcgacatgctcgatttcaggtttttcattttgcagataaataggccagccagggtcagtgacaaaaataagacaccaaaagcacgtaagagtctagcttttcaggaagccctgccaaatggcatttgctcattggcccaagctactgatcgacatcatcagtttaaataggaaaaaatacatcttttccttcttattgctgcttagggcacctgtataatttgagtgattaagctgcaattcttagaaaaggaatcacatcactcaggtcaggaagattaactccaagaaacatctatgcaattggcacacttctccccatcccttaagaagacatattaaacaacaaaggttgatagctaacaaattttaaaatacaaagaaaaaaggataaagaagaaaatgtaggctgggcgaggtggctcatgcctataatcccagtactttgggaggccaaggcgggcagataacctgaggttaggagttcaagaccagtctggccaacatggggaaaccccgtctctactaaaaatacaaaaattagccgagcctgatggtgcacagctttaatcccagctactcaggaggctgaggcaagagaattgcttgaacccgggaggcggaggttgcagtgagctgagatcgtgtcactgcactccagcctgggcgacagagtgagactctgtctcaaaaaaaaaaaaaagaaaagaaaatataaatcactcataaatccacagcccactgcttcctttggacaattttttccctgtaaatattatgtgtgaacatgatgaggatcaagcctgttttataagtaaactttgtctacttattatattggaagcatttactaaatattttcctttcaacataacattttaggagagaattttgggacttttcctttttaatattagggttttcctccatcatctacaaaagtagcatgtgttccctgcagaaaacttggaaaacgatgaatgactgtaaaatattccatttgctacgtgagtcgtcactcacttaaccatcctccttatttatttatttattttgagacagagtttcactcttgtcgcccaggctggagtgcgacggcgtgatcttggctcactgcaacctccgcctcctgagttcatgcgattctcctgcctcagcctcctgagtagctgggattacaggagtccgccaccatgcccagctaatttttgtatttttagtagagacggagtttcgccatgttggccaggctggtctcaaactcctgacctcaggtgatctgcccacctcagcctcccaaagtgccaggattacaggcatgagccaccgcacatggctctttttttttttttttgctgttataaatattcctttgatcattgtctgattgtcttattacttccccaaagtagattcctagaggaaaatattactaggttcagggagataagaaactctttaagcttcttaatacctacagctaaatggttgtccagaaactctatattgacttgtggttgcaccagcaggccatgagactgcattccaggacaatctcagcaacccctaagccttaatagtttttttttttctttctatgtttgtttgtctagatctttaacccaagagattaaaaatatgctatcactcgactacgttatttgcggatctttatattactgagtgtgacttcatttttcctttattggttctctgtgattctccaaagaattgtcccctccttgtcttttgtctgtttttccatgaatttcttgtgttttccttactcctgtgttgtttattcattaaggatattaaccttttatgtatcgtgctatacaacttactcttttccatttgccagtaagctttctttaaatgatttgaaacaggctttcatgtttatttgtacaatttaatatatcagtaacactttaaaacgtgttcctttataagtcattctagatggggttattatgagttgtgctaaggttttacggcaattttgaaagggatcttttcccttattttatattctaattattgcttgtgtatctacagtctttttgcttatttctatgtacctactttcccaaactctaactcatttaaaaagtttcataattggctttcctgggttttcaatgacacactagaagaggggtcaacaaaattttcccgtaaagggctagataataaatattttgggttttgcaagccaaatgacctctgtcacaactactctgtcattgtagcttaaagcagccctacatgatgtgtaaacaagtgggtggggttgcattccaataagagttcatttacaaaaacaggcagctagcccatgggccatagtttgcctacccttgagctagacgctctgcaaatagcaatgactttatttcccacattccattctttacaactctgatttctgtttcttgtcttattacattggctggatgcccagagaaatgttaattagtaatgatgagatggggcttccttgttttgttcctaactctgctaagaataattttaagaatgatgttagcttggctgttggtttaacctaggtaatatttatcttgtagaagaaatattctattatgagttttatgaagcctctttttttcctcccctttctctaagttaggaattttaaattaaggttattgaaacagatatgatcttccttattgcacctcttgatgaactagatgatgttatcaaatcttctgatcttaaaccatccttgcattttggagataaacaatattgccagtgcagtgttttatttgggacatttgaatctaacatcacatattagcttggcctgtggcttttgttcagtgcagtatctttgtcaagttcttttttttttttttttttttttgagacagagttttgctctgttgccaggctggagtgtgcaatggcgcaacctcggttcactgcaacctctgcctcccaggttcaagcgattctcctggctcagcctcccaagtagctgggattacaggcgtgtgccaccatgtctggctaatttttgtattgttagtagagacagtgtttcaccatgttgaccagaatgttctcaatctcttgaccttgtgatccgccccccacctcagcctcccaaagtactgggattacaggcatgagccaccatgctcaacctctttgtcaagttctttaagggtgttatgttcatttcataaaatgaactgggataacttttatagatttctgtgccctaaaatagtttttctattataggaaatagttgctctctcacaatttgaaagaacgtgtctataaaactctctgggccaagggacttttttgaggaaattatttgacacatatctttttccaaggttcataaccacttaatttttctgcttctttttgaatccatttagacaagttaaattttcccaccttactgaaactttcaaatttagcaagtgcaccattgtccaaagaacttaacacattaaaattttcttcagacgctagttttatgtcatcttctttccttctggtttgtgttttccctttgattatgtttaccataggcttagctgttattgcttttcccttcctaacacatttatagttttatagtttaaagtttatttcttaatttatcaatccatttaagtctgctaagtaacatcaaagccaagctttgacaatattctacaagttaaggtatgtgatattcacattttcattattttccaaaaggacttcaatggaagtttccatttctgctttggcccgatagatatgtaagtgtttaactttttaactttttttttttttagacagagtctcgctctgttgcccaggctggagggcagtggcgtgatctcggctcactgcaacctccacctcccaggttcaagtgattcttctgcctcagtctcctgagtagctgggactacaggcgcacgttaccacatctggctaatttttgtatttttagtagagaaggggtttcaccatattggccaggctggtctcaaactcctgacctcaggtgatccgcctgcctgggcctcccaaagtgctgcgattacaggtgtgagtcactgcgcccagcctgtaagtgtttaacttttaaccaccaagaagtgaagttttctgtttaatcttttgaaattaacttttagtttctattgcagcgtcatcagaaaatgtgtggtcagaaaacaaatcctactttgggggcatttcttaagattctctttatggtctttttgtattaaaagactaacaacattgtagaatggaaaagaaaacagctccaccacttatcaagccaaagatatgtccgtattagcaagattcagataatttctatacaggcacaaatgggtctcgtgaaaataaccaagacgttggtgcttcatgagtaactactgagaaattggtatctcaacaaccagagatgtaaaatgggctcatcaaacaggccaaatgagtttatataccaaaaagattataaccaaaaagaccatgaagtggcaaaagacaaagcatcaactgatttttttttttgagacagagtcttgctctgttgcccaggctggagtgcagtggtgtgatcttggctcactgtaacttccaatttctgggttcaagcgattctcctgcctcagcctcccaagtagctgggattacaggcgtgcatcatcatgcccggctaatttttgtatttttagtagagacggggtttcgccatgttgcccaggctggtttcaaactcttgacctcaggtgatctgcctgcctgggcctcccaaagtgctgggattacaggcatcaggcatgagccacagcacctggcctaggcagcattttattatccagcaatcccacactaacctggtcatctcaaccaagggtccttctgaccccatcacccagggggatatttagcaatgtctgaagatatttttggttattactactttagggggaagacacactactggcatcagatgagtggaagccagggatgcttctcagtgttgttggacagtgccctagaataatctgaccccaaatattatttattattattattagtattatgtatttattcttttttttttttttttttgagacagagtctcgctctgtcacccaggctggaatgcagtggcgagatctcggctcaccgcaacctccgcctccagaaatcaagtgattctcctgcctcggcctcccaagtagctgggactacaggcgtgtgtcaccatgcccggctaatttttatatttcttgtagtaacggggtttcaccatcttggtcaggctggtctcgaactcctggcctcaagtgattgccccgcctgggcctctcaaagtgttgggattacaggcgtgagctaccaagtccagctgtggccccaaatattattttatttttattttttttgagacggagtctcgctctgtggcccaggctggagtgcagtggcacgatcttggctcactgcaagctccgcgtcccaggttcacgccattctcctgcctcagcctcccgagtagctgggactacaggcgtgtgtcaccacgcccggctaatttttatgtttcttgtagtaacggggtttcaccatcttggtcaggctggtctcgaactcctggcctcaagtgattgccccgcctggggtagctgcgtcaccacgcccagctaatttcttgtatttttagtagtgacggggtttcaccgtgttagccaggatggtctcgatcttctgatctcatgatccgcccgcctcggcctcccaaagtgctgggattacaggcgtgagccacccgaatattattaatagcaggactgagattgagatctgctttggaccaagcccgtacatttttagacccttcttggctacagttagtattgcaaatggccactagagggcagatcaggccacacaggtgcctgggaaaaaataaataaataaacactctgctaaaggaagaaaatctctccaagtggtcccaacttgcctctttagtctcacctcctgttcctcccaaaagccacgacaggtaaacatctccttgcctttctcccaagttctccaagctttttctctctcccaggaccatactgcttcattctcttaagactcaagttgaaaagaaacgtccctggccaggggcggtggctcacgcctgtaattccagcactttgggaggccgaggcgggcggatcgcctgaggtcgggagatcgagaccagcctgaccaacatggagaaaccctgtctctactaaaagtacaaaaattagccgggcgtggtggcgcatgcctgtaatcccagctactcaggaggctgaggcaggagaattgcttgaacccgggaggtggaggttgtggagagccgagatcgcaccactgcactctagcctgggcaacaagagtgaaattccatccaaaaaaaaaagaagaaggaaagaaggaagggagggagggacggacggagggagagagggagggaataaagaaaagaaaagaaagaaggaaagaaagaaagaaggaaaaaaagaaagaaggaaggaaggaaggaaggaaggaaggaaggaaggaaggaaggaaggaagagatccctgactctcctccgtggaattcagtgagcgacacggtgttcttttgttcataccctgtcgccctttcatgaaaatattctgtttccagatcaacctccattcatggtgtaggagctgctgggtcggggcacccagccgcggggagctcagactccggggacccccacccacctctgcaaatgcacgcgggaggtgcagagatgtttagtgagcaaacagtggctgcaaacagaaggcagggagggggtacccaggaagcactcccatgattctatgttttagcaagagtgtgttagtgaaggtttctccccacattcatgcccagatttcatttcagagtgaaggcattggatttctgaattggtgaagcatctgctctccagcacagctgcccgccgcatgcaaaaagccacagaaacccctgggttctccgaggcatctgcctggcacgccgccggccctgcgcggagcaggcaccaggggtcgcacaggtgagtcatacctagggtcctcggcaccagtgcctgaagaggtttttctgtggaaacaaaaccaacgcctttgaggacagagggaacttcattagacagaccactgggctctgacacttggaggccacatgtgtccgagtaagggcaccctggctttgaccctggaccactcgctcccatcacttgctagacggagtgagctacatcttccccagcaggtgcaggggtccagcaagggaaggggaagaaatcagagaaaattctccccagagacggcctgctgaggtggccctgggatgtcaaacgtgactacatgtggacatcacaactgactcagccacttctccaagtctggcagaatttttcttttctttcccttctttcttctttctctctctctttctggtttctttcctctttctccttttcttttctctttctcttttctctctccctctctctccttccttccttctttcctcttttactttctttctctctttttccctctttccttccttcatttgctttctttctctttccttccttctttttttcattttctttctctttcttttctttcttttccttttttccttccttccttccctcctctctccctcccttgcccccttcctttctctgtcctttctttctctctttcctttctttctttctctttctttctttctttctttctttctttctttctttctttctttctttttctttctctcttccttccttcctctttccctccctccctccattcctttctttctttctttttttcccttccttcctttttgagacagggtcttgctctgttgcccaggctggagtgcaatggtgccatcatagctcacagcagcctccaactcctgtgctccagcaattctcccgcctcagcctccggagtagctgggactacaaggcatgcaccaacatgtctggctattttttttttttttttccttttttagtagagatagggtctcactctgttgctcaggctggtctccacctttggcctcaactgattctcccacttcggcctcccaaagtgctgggattacacgagtgagccactgtgcctagccaacattttgtttgtaacaggtgaaacagtaaccactttgaagccttggctgtccccctgaacattcttttggactcagggtcataggggaaacatgcaacaaaaaaagaaaaagaaaagaaaaaaaaaaaagaggattcttacacactggtggttctgggagaaaagtctgctcggatgaatagcattggtaaacatctgaacagatacttttaatttttttttagagacagggtctcactctgtcacccaggctggagcgcagtggcgccatcatcgcttatcgtagcctccatctcctggcctcttgtgatccttctttctcagcctccccatgggctaggagttcagacatgcattaccatgcctgactaatttttaaactgtttttttttttttttggtagcgatggggtctcattatgttgcccaggctggcctcaagcaaccctaccacctcggcttcccaactagctgggaccacaggcttacaccactgcgctcagctaaagcctcaataatcacggccaggcacggtggctcacacctataatcccagcactctgggaggccgaggcaggcagatcacctgaggtcaggggttagagaccagcctagccaacatggcaaaaccccgtctctactaaaaatataaaaattagctgggcgtggtgctgcgcacctgtagtcccagctacttgggaggctgaggcacaagaatcactcgaacccggaaagggtgagctgaaatcgcaccaccgcactccagcctggacgatagagtgagactctgtcaaaaaaaaaaaaaaaagagagagagagaaaaaaaaaaatgttaatcgtctaacggagtttgttttggaactcacgtggagaccagctcaggagaggtaagaaaggcaaatgctgagttttgtccatttttccccttttgtgcgattatttgctcttcctgataaaattcccctcgaaatttcgaaactgcaagatctcttcctccacccaggaaagggctccattcagactccacccacccttctgccgtctctgggtcccactacctctcggtccctaagtaatgaccttccaccaacaccaagccaattggcacccactaagagagcccagcgccaagtcctgacctggggacgaaaaccacgttgtgcaggtaatcctcaaacgtcttcctaaacgaggactcctccagctccttcaggatctgagagtctgtctttggacaggagcagcattcgccggccgaatcctcatactcactctggttgtgcttctgagaatcttcagactcgaatggtggagaccaggtcctcgagggcagcttcagccctggagaaagaaacagaaaaggggggctcaagtctctgcggctgaacacacatacacacacacacacaccccacacacacacacaccacacacacacaccacacacacacacaccacacacccccccacacacacacaccacacacatcacacaacacaccacacatacacacaccacaaacacacaaccacacacacacaccacacaccacacacaccacacaacacaccacacatacacacaccacaaacacacaaccacacacacaccacacacaccacacaccacacacacgcaccacacacacaccatacacgcaccacacacacactacatgcacacctcacacaccacaccacacaccgcacacacaccacacaaatcacacacacaccacacacacccacgccacacaccacagaccacacaccacacaccccacacacaccatacacgcaccacacacacaccacatacacacttcacacacaccacacaccacacaaatcacacacaccaccacacccacgccacacaccacacacacaccacacacgcaccacacacacacacagtgaagggggccttctcagagaggctgagctgagacagagcctagatttgagctccgctttggaaaaaagccagacactatggttcacgcctgtggtcccagctacttgggaggctcaggtgagaggatcgcttgagcccaggagttcgaggctgcagtgagctatgattgcacccctacacttcagcctgggtgacagagtagaaccctgtctcaaaagattaaaaatatagccgagcacagtggctcacacccttaatcctggcactttcggaggccgaggtgtgaggatcacgtgagcccaggagttcaagaccagcctgggcaatgtggtgaaaccctgtctctactaaaaataaagtaaaataaccaataaaaataggccaggcagctcacacctgtaatcccagcactttgggaggctgaggtaggcagaccacctgaggtcaggagttcgagaccagcctggccaacatggtgaaaccccgtctttactaaaaatacaaaaattagccaggtgtagtggcgcatgcctgtaatcccagctactcaggaggtcgaggcaggagaatcgcttgaacctgggaggtggaggttgcagtgagctgagatggcaccactgcactccagcctgggtgacagagcgagactccgtctcaaaaaaataataaataaataaataaaatatctgtatctagagtgtcatctgagaagtgcatgtcaacatgttttattagtttagtgcataagtaattgcagcttttgctattaaaagtaatggcaaaaaaccacaattacttttttttttttttttttttgagatggagtctcgttctgttacccaggctggagtgcagtggcgcgatcttggctcactgcaagctccaccgcttgggttcatggcattctcctgcctcagcctcctgagtagctgggactacaggcggccgctgccacgcccggctaatttgttgtatttttagtagagatggggtttcattgtgttagccaggatggtctcgatctcctgacctcgtgatctgcccgccttggcctcccaaagtgctgggattacaggcgtgagccactgcacccggcccacaattacttttgcaccaacctaatagaaactgccaggtggctgggcgcggtggctcactcctgtaatcccagcactttgggaggccgaggcgggcagatcacctgaggtcaggaggtccggaccatcctagccaacatggcgaaaccccgtctctactcaaaatacaaaagttagccgggcgtggtggtgggtgcctgtaatcccagctactcaggaggctgaggcaggaggattgtttgaacccgggaagcagaggttgcagtgagccgagattgagccattgcactccagcctaggcgacaacagcgagactctgtctcaaaaaaaggcaacaactgcccgacaccataatcacaggactgaagattataaggtaaccagacaatgcttctgtcttcagtggacttacagtctacaataaactcataaatacacagtcacaggtcagatgttggggtaaaagaacagtgggtgtctgcgggtgccattttcatgaaggggtctcaaagaaagtcaccactgagacatcctgaattcagcaaaggaaagcaccatccacatatcgtggtgtaaagcaattcagacatagcagaaacccagcagaaaggccccaggacaggaattttcttggcacattaaaaaacgtctggccaggcgtggtggccctctcctgtaatcccagcactttgggaagccgaggcaggaggatcacttgaggtcaggagttcgagaccagcctggccaacatatagtgaaacgctgtctctactaaaaaatccaaaaatcagctgcacgtggtggcacatgcctgtagtcccagctacttgggaggctgaggcaggagaatcacttgaacctggaaggcggaggttgcattgagccaagattgcgccactgcactccagcctgggtgacagaggaagcattccatctctcaaaaaaaaaaaaaaaaatctctggaaaccaatatagctggaagggggtgagagagagaatggtgggagggggttagaaaaagataaagggggccaggtacagtggctcttgcctgtaataccagaactttgggaggctgagggggaaggatcacttgagcccaggagttcaagataagcctggccaacaagatgaaactccgtctctaccaaaaaatacaaaaattagccaggcatggtggtgtgcgcctgtaatcccagctactcaggaggctgaggtaggaggattgcttgagcctgggaagtcgaggctgcagtgagctgagatggggccactgcactccagcctgggcaacagagtgaaatcatgttgaagaagaagaaaaagaaagaagaaggagaagaaggaggaggagaaggagccaggtcacagctgcatgaaaatatcaatcaatcaattaatcaaccacacaaataagatgggagggcagagtagaatgccatatggaattcttttttttttttttttttttttttttttgagacagtcttgctctgtcgcccaggctggagtgcagtggcgtgatcttggctcactgcagcctccgcctcctggattcaagtgagtctcctgcctcagcctctcaagtagctgggattacaggcgcctgccaccaccctggctaatgttttgtatttttagcagagacagagtttcatcatgttggccaggctggtctggaactcctgacctcatgtgatctgcccacctcggcctcccaaagtgctggaattacaggcctgggtcaccacactgggcctccacatggaattctaaggggtccattcatgagtccagaaatcagacttgatcagtgaatggttctcacccagggggtgattttgtctcctactagggacattgggcaacatctggagatatttttaggtgtcaggacctggctggggcgtcctcctggagcatggaatgggtgaagaccagagatgctgctgagcaccctgaagtgctcgggacagtcccaccccagagaatgatccaacgccagacagaaaaaacaccaagacagagaaaccctgacctaaaggcatgagaggagatagaggaaggaacttttcaaacatgcatagaaaagggaatttaaaaattaataaatgaagaagaacaccagtagcttataaaggtagcagtcctaaaaatacaaaatacaatactatttctctcttttttttttttttttttttttttgagatggggtcttgctctgtcgcccaggctgcagtgcagtggcgcaatcttggctcactgcaacctctgcctcctgggttcaagcgattctcctgtctcagctccactccccgtaactgggattacaggcatgcaccatcacacctggctaattttttgtttgtttgtttgttttttgtttttgtttttttgggatggagtctcgctcttgttgcccaggccggactgcagtggcgctatctcggctcactgcaagctctgcctcccgggttcacgccattctcctgcctcagcctcccaagtagctgggactacaggcgtgcaccaccatgcccggctaattttgtatttttagtagagacggggtttggccatgttggccaggctggtctgaactcctgacctcaggtggtccacccgcctcagcctcccaaagtgctgggattataggcttgagccactgcgcctggcattttttttgtatttttattagagacggggttttgccatgttggccaggctggtcttgatctcccgacctcaggtgatccacccgccttggcctcccaaagtgctgggattacaggcgtgagccactgcgcccagccgatttttgtattttttttttttttttttggtagagacagagttttgctgtgttggccaggctgatctcaaactcctgagctcgaacgatctgcccgccttggcctcccaaagtgctgggattacaggcatgagccatcgcacccagcctacaatacttaagtaccgcagctggtcatgtcttaagccccgaagtcaaatcccagggttcttgtgacccacggtgcaagcacagttatgcctctggtacagccactgagatggacggacacagctctttacaagcaaaatctgcaacagtccctggagagccacctcccctgctgccactctgcttggtgcctggtgactgctgagcaaaggaaattccattttctctcctccccttaatgcctcgaggatagacaataagctctaaatcgtgtatcaagtaccttcctgtgaatggtgagtatccactcggaaacccaagtatttacacagctttaaaagcctatgagagactggaaaatacttcttaagtttataaatagacatagaataccctgcctgggttaactctgatgggagctagttacagcattacagatggaaaaaaaaatgtagaactgcctgaataagggaagctcctggtattattattattattattattattattattattattattattatttggagaggaagggatatttgttcaggcacaggtatcattcctgatacctgctacctcttcctagaatccactgcatgaaacatggtacactgtggttttcctgagattagaaaaatgaagcataatgggccaggcgcggtgactcacgcctgtaatcccagcacgttgggaggccaaggtgggcagatcacgaggtcaggagatcgagaccatcctggctaacatggtgaaaccccgtctctactaaaaaatacaaaaaattagccgggcgtggtggcgggcgcctgtagtcccagctactcgggaggctgacgcaggagaatggcgtgaacccgggaggcggagcttgcagtgagccgagatcacgccactgaactccagcctgggtgacagagcgagactccgtctcaaaaaaataaaaagaaaagaaaagaaaaatgagcataatgaagtctctagaatcagattcacagagacagaaaggaggatggtgggtgctggggctgggggaaggagaaggggagtgagtgtttcatggggacagagtttcagtttgagaagatgagaaagttctggagatgatggtggtaatggccgcacaaccacggcaatgcacttaatgcagctcaactgtgctcttaaacatggttataataataaattgtatgtgatgtatattttaccgtggtaacaacatatacactagtgatattaacaggaagggtttgtaagcttatttatttgtgtgtgtgtgtgtttgaaattgtggaaaaataagcatcacataaaatataccaatttaccatctcaatttttgttttgttttgtttttggtggagtcttgctctgttgccaggctggagtgcaatggcgtgatctcggctcactgcaacctctgcctcccagattcaagcgattctcctgcctcagcctcctgagtagctgggattacaggcacccaccaccacacccaactaatttttgtatttttagtagagacggggtttcaccatgttgcccaggctggtctcgaactcctggcctcaaagtgatccaccccacctcggcctcccagtgtgctgggattacaggcgtgagccactgtgcccggtaaatctcaaccattttaagtgtgcagttctgtggtattaagtgcattcacaatgttgtgcaatcatcaccaccatcatctccggaactttctcatcttcccaaactgaaactctgtcctcaacccgtcccctccgcagtccctggcactccccattctactttctgtctctatgaatctgaggactctagggacctcctaggagtgaaatcacacagaatttgtccttagtgagtttccttttaatgatattaactttgtgacaattacaaataaaaccatgtttaaatggtcccttggtaattacagatttagactttcggaattaaaaaaaaaaaaaaggaagcttcgagtgacattactggtggcagctctcacgggtggttctggttacttgaatgcagggccaacagcttacagcggagctgatgactggactcgccctggagttatataaagcatcagagcagataaatcacgtttgcaaccctcggctcaggcggggatgatgtcacacacatacatatagcatatgagcttagagctgggacagctcccagagatcatctgtcctcccgccccttctcccaaaaaggaggcagacggtgacttgcttgggaacttagccaaagcccttcagcaggtcagggccagagccaagagcaaatgttgagctcctggcctcagccacacctcgccagtggccccctggccttctcctccagggtcatggaccgaggatatcactaacagaaaatatctcaagaaaaatacatcaagatgcacaaggaaaccaaaactaaagaaggaaatgggcccagcgcagtggctcaggtctgtaataccagcactttgggaggctgaggcaggaggatcgcttgtggtcaggagttcgagaccaccctgggcaacatatcaagatccccacctctaaaaaattattattatttttattattattatttttcttagatggagttttgcttttgttacccaggctggagtgcaatggtgcaagctcggctcattgcaacctccacctcccgggttcaagcgattcttctgcctcagcctcctgagtagctgggattacaggcccacgcctggctaatttttgtattttgagtagagacggggttttgccatattggccagggtggtctcaaactcctgacccctggtgatccacccgcctcggcctcccaaagtgctgggattacaggcatgagccactgtgcccggcctaaaaaattattttaaataattagccaggtatagtgtctcaggcctgtagtcctgtgtagtccagctactcaggaggctgaggcgggaagatcgtttgagcccaggagttcaagcctgcagtgagctatgattgtgccactgcactccagcctggacaacagagtgagaccccatcttaaaaaagaagaagaaaaagaaaaagaaaaaagtgacagatgcttctccagtttggtgggttctaaaaaaacccaatgttaaaataattttaggctgggcgcggtggctcacgcctgtaatcccagcactttgggaggctgagacgggtggatcatttgaggtcaggaattcaagaccaccctggccaacatggtgaaaccccgtctctactaaaaatacaaaaattagccggtgtagtggcagcacctgtaatcccagctattcaggaggctaaggcacaagaatcgcttgaacccagcaggcggaggttgcagtgagccaagatcaagccactgcactccagcctgggtgacggagtgagactccgtgtcaaaaaaaaaaaaaaagaaaataataataataataattttaaactaatgtatacacactagtttgagactttaaatattattccattttccttcagatggatggaggtctattaagtaaacaagattaagaaaaatttgtcattaagttttataataaaattatttatataattatttataaattttatttataatttttatacaataaaatgattgcacaacattgtgaatgcacttaatgccttttttttttaattttgtataattttttttatatatatagagacagggtctcgctctgtcacccaggctggagtgcactggaataatcatagctcactgcagacttgaactcctgggctcaagagatcctcccgcctgggcctcccaagtaactgggactacaggtgtacaccaccatttttttaaatttttttagagatgggatcttgctatgttgcccaggctggtctcaaactcccggcctccagtgatcctcccaccttggcctcccaatgtgctgggattacaggcatgagcgccaagcctggcagacatttttaattgaaagtatggggtgggggatatgagataaccaattcttgctgccttcgatccttacaactaaaggatctcagtggggccaaaatccttccctgactttgtcaataaccattagttgtgtttctagctttgcacagaagtcttgcgtgggttaacacagctgcatccccatcagtgtgaggagggatgaagagaacaaggaaggcagggagggagaaagaaggagagacaagaggagaaaatcccagagggaaatggtgccaagacatgggaaaaatctggttttgacacaagtcttcagtgcgtgcttgtgttacgatgtttaaaaatgtgtatgtatgagccggtcatagtggctcacgcctgtaatcccagcgctttgggaggctgaggggggtgaattgcttgaagccaggagtttgagaccagcctgggcaatataaggagactccatctctacaaaaagaagtttaaaaattagccagggccaggcgtggtggctcatgcctgtaatcacagcactttgggaggccgaggcgggtggatcatttgaggtcaggagttcaagaccagcctggccaacatggtgaaaccccatctctactaaaaatacaaaaattagccgggtgtggtggcaggcgcctgtagtcccagctactcaggagcctgaggcaggagaatcgcttgcgcctgggaggcagaagttgcaatgagccgagatcatgccactgcactccagcctgggtgacagagtgagaccctgtctcaaaaaaaaaaaaaaaaaaaaaaattacctgggcatgctggtgcacacctgcagacaattgtggtgttccagcaactcatgaggctgaggcaagaggattgcttgagcctgggaggtggaggttgcagtgagcagagatcatgccactgcactccagcctgggcaacagagtaagaccctgtctcaaaaaaaaaaaaaaaataggccgggtgtggtggctcatgcctgtaatcccagcactttgggaggccaaggtgggtggatcacctgaggtcacctgaggtcgggagtttgagaccaggctgaccaacatggagaaaccccgtccctactaaaaataccaaattagccgggcgtggtggcgcgtgcctgtaatcccagctactcgggaggctgatgcaggagaatcacttgaacccgagaggtggaggttgcgatgagccaaggtcgcgtcattgcactccagcctgggcaacaagagtgaaactccatctcaaaaaagtaaataaataaaaaataaaataaataaataaatagataaaaacatgtatgtgtgttttcatatgagatagaatggagtgtgtgtgtgtgtgccttccgacactgagacacaggaagagatagctgcttccctagaggtgaagcaaagtgcatcagacacacgtgtgcaaaccccaccgatcctagcacagctgcctgcactcacctttgaggcaataatccagctcgaacagctcactgtcttccgcctgcctctcccagaaaaccaggtagtgggtgatgttgccattggggtcggagggtggtttccacttcagaataatctgggatgatgagttagacactgagattggatccaggggcacagaggggtctgtcagggagaaaggaaatgggtccatcatgagaaacagtgtgcaaagaaagctggtgggaggatggcgggggacacacaagttaaagacatcatgagggcacccatcccagcattttgggcggccaaggcaggcggatcacgaggtcaggagatcgagaccatcctggttaacacagtgaaaccccgtctctactaaaaatacaaaaaattagccaggtgtggtggtgggcgcctgtagtcccagctacttgggaggctgaggcaggagaatggcgtgaacctgggaggcggagcttgcagtgagccgagattgcgccactgcactccagcctgggtgacagagcaagagtccgtctcaaaacaaaacaaaacaaaaaagaaaaaaaaaaccaccaccaaccaaccaaacaaaacccaaaaaacccaaagtaacggaggtggccgagggagctggggatggggagggagtccaaacacctgggagctagaagtttctgaaaactgtaagtcttttggtgtcactaaaagatacaggatgaatgagcggggattaactgaagaagatagggttgatttataaagtttgaattcgaggccaggcacagtggctcatgcctgtaatcccagcactttagaaggccgaggtgggcgaatcatctgaatcacctgagatcaggagttcgagactacacctggccaacatggtgaaaccctatctctactaaaaaaaaaaaaaaaaaaaaaaaattagctggacatggtggtgggcgcctgtaatctcagcttcctgggaggctgaggcaggagaatcttgaacctgggcagaggttgcagtgagctgagaatgcgccattgaactccagcctgagagacaagagtgaaactccgttaaaaaaaaaaaaaaaaaaaaaaaagcttgaatttgagcctacaggacggggtttctcacccttagtactattggcttttaggactggataattctttgtcatgaaggagggtgcatcctgtgtgttgcaggacatggaacagcctctctggcttccgcccacgaaatgccagtggtttcatctccacagctgtaacaaccaaaaatgtctccagacattgattggcagctgttccctggcagagcagttaacctcctttgggaactactgctataagagaagcacttaggttttacaaaaatataattaggccgggcccagtggctcatgcctgtaatcccagcactttgggaggccaaggtgggcggatcatttgaggtcaggagttccagagcagcctggccaacatggtgaagccccatctctattaaaaatacaaaaatggctgggcgcggtggctcatgcctgtaatcccagcactttgggaagccgaggcaggcggatcacctgaggctcggagttcgagaccagcctgaccaacatggagaaaccttgtctctacaaaaaaaaaaaaaaaaaaaaaattcgccaatcgtggtggtgcatgcatgtaatcccagttactcgggaggctgaggcaggagaatcgcttgaacccgggaggcagaggttgcagtgagctgagatagggccattgcactccagcctaggcaacaagagcgaaactccatctcaaaaaaaaaaaaaaaaaaaaaaaaggctggcatggtggcttatgcctgtaatcccagcactttgggaggccaaggtgggcagattgcaggtcaagagattgagaccatcctggccaacatggtgaaatcccatctctactaaaaatacaaaaattagctgggcgtggtggcacgcctgtagttgcagctacttgggagactgaggcaggagaatcacttgaactgggacggggaggttacagtgagctgagatcacaccactgcactccagcctcagtgacagagtgagactctgtctcaaaaaacaaaacaaaacaaaacaaaaattagccaagtgtgctgtaatcccagcaacttgggaggctgaggcaggagaatcacttgaacctgggaggtggaggttgcagtgagtccagatggcgccactgcactccagcctgggtgacagagtgagactccatctcaaacaaacaaacataattaaattgctgtgaaatactccaggccaaaacaaacaacaaaacaaaaagaagtaacaagtgggaagagggaacaggcgtcgagatgaaacaaaaatgaccaaaggctgaagctgggaggcggctaactatggggttttgttctgtgttgtgaatatttgacaatttttcataataggatgaaaaatataaatattcccatcaagtggcttgttgctactgcctcgtctgaaactataagcctcaatacccagctcctttaaaagccaataactgactgggcaaggtggctcacacttctaatcccaggactttgggaggccgaggcaggaggatcacttgaggccaggggttcaagaccagcctgggtaacacagcaacgttctgtctctacaagaaatacaaaaattagctgggtatagtggtgcatgcctgtagtcccagctactcaggaggctgaggtgggagaattacttgaacctgggaggcggaggttgcagtgagccgagatcatgccattgcactccagtccgggtgacagagtgagacttcatctcaaagaaaaaaaaaaaaaaaagccacacatggtggtatactctggtagttccttctacttaggaggctgaggcagaaggattgcttgagcccaggagtttgaggctgcagtgagccatgatcaccccactgcattgcactctagcctgggtgacaaagtaagaccctgtctaaaaaaaaaaaaaaagccaataaccatatcaaggagcattttatacaacctcactgcatcagcctattaaaagcaagaggtctgattcacatacgaattcacattcccaagacacactcactggtggcatctgtctggacataaatgatgtcactcttggccccataggtccggcgttcatccgaaaaggtgaccagggtcttcacaaagatggcatactgggtccagggcttgagaccccgcatcagccaccctgggtggttctgtgatttggggtcgttggacctcaggggtgggtcaatgtctaccaccgtccaactgttggaaccacacgcatcctgcccgtcgaactccgtcacattctgataagggctttcaagacaaaacagcagaaggcagttacccttacaagaccgtcacactgagtgccgtgcagatgaggcctgggaagttacatcccatagggtcacatgttactcacccaacaatctaatgccacaagaaaaaataactcgggaacagccaaagagaaaggaactgtcaaccctgacatctcaatgaaaaaacacagcttgggcatcccttattcaaaacacttgagacttggccaagtgcagtggctcacgcctgtaatcccagcactttgggaggccgagaatggcggatcaccagaagtcaggagttcgagaccagcctggccaacatggtgaaaccccgtctctactaaaaatacaaaaattatctgggcatggtggcagatgcttgtaatcccagctattcaggaggttgaggcaggagaattgcttgaacccgggaggcagaggtagcatcagctgagatcgcaccactgcactccagcctgggcgacaaagggagactctgtttcaaaaacataaataaataaataaataaataaatgcttgggaccagaagtgttttggattttggatattttggggttttgaaatatttgcattttactagttaatttgcattgtactggttcagcatctctaatctaaaaatctgaaatctgaaatgctccaataagcatctcctttgagtatcaagtcggcccacaaaaagctttggattttggagcattataaatttcagattttcagattagggatactcaatctgtaataatagtaatagcaggagctccctcacaagttactgataagattagactgtgtgtcagtgctcagcaaggcacaaggtaaatcttgagggctagaactattattaatattactactggtcaggtgcggtggctcatgcctgtaatcccagcactttgggaggccaaggtgggcagatcacctgaggtcaggagtttgagaccagcctggccaacatggcaaaacccgtctctatcaaaaatacacaaattagctacgtgtgatggtgtatgcccataatctcagctactcaagagactgaggcaggagaactgcttgaacccgggaggcagaggttgcagtgagccaagatctgccactgcactgtaccctgggcaacagagcaagactctgtctcaaaaaaaaaaaaaaaattggggataaaaaagaaaaatagataagcaatacatttgataacatccacttagtagactgagctcctgactactaaggatgtctgatgagacatacacaggcaaggcaaaatagaatattgccccaggaaactggccagtccgggcttctatgggaaagctgtctgcttccattttaggcatttgataaaagcagacactattgactttgcatgccatcgactggtgagattgtaaaaaggaacctaagatatttattccaggaggaggagggagatagacaggaacccaagaggggcagattggagcacaaacgtagcaagcacagagccagccagccctcgcctcctcagcgtctctctaactcttctacttacgcctctttgtagaacagcatgaaccccaagaggtctcggaagtcggggggccagtacggctcccatctcagcaagatcttgtcaaaagatgtccgaatgtaagaaaatttaagtaactcattttcacctggaaaagttaaaacaaaaggcaaaaatgagctatttcagtgtagtttcagaccaaagcctgggacccccacacttcctggagggaccgtgagaaggcagaggtgacgctgctattcccttaagggtctcctccccatgtgcctggctgagtatgaatgggggaagattcaaaggtaagagccagttttgcaacttggccactcacactcacgtaagccaatgacttgactcagccagacagtcaactgaataagcgcagtctgtacccgcgcaagaaggacaaccggccaatagttattggaggaagggatttccaagggtgatgtttgtcctgacacaacgttgtctcgcatatggacttgtaagactgacctggaaggaggtgcaactccagtgcaaataaacctatgccaagtgagtttagagaccctgcagatcattagacatcggagagacgcatctaagtaattctctctgcctagaagacaaaccctctcctaaacctcaccccaacctcgctctctctccttgcactacattttttttgagacagtcttgctctgtcaccaaggctggagtgcagtccacctaccgggtttaagcaattctcatgcctcagcctctcaagtagctgggattacaggcacccaccaccacgtccagctagtttttgtattttttttttttagtagagatggagtttcaccacattggccaggctggtctcgaactcctgacctcaagtgatctgcctgcctcggcctcccagagtgctgggattccaggcgtgagccaccatgcccagcccttgcactacattttgacataagtaactaactccccatgaaggtatcccagaagcccttggcagctcactgtttagaatctgtcagggaagtgcagtcagcaggcagcctgcagctgcagaaactgcaggacctgctgtagcattccagccaaaacctgactctccctggacagcccccacctatgactgagcttggtagatgcctggccgtccctttgcaatgcagaacttccctgcagacaaccgtggccttgatctctttctgggtttggccaagactcagggatgcatcaccatctgagactctcccagccctatcctccctccttcccgctctctgttcacagaggtcagacacacgctattgtcaaaaggctcttcatggctgagcgtggtgactcacacctgtaatctcagcactttgggaggccgaggcgggaggatcacctgaggtcaggagttcaagaccaccctggccaacatggcaaaaccctgtctctactaaaaatacaaaaaaaaaaattagccgggcttggtggcatgtgcctgtaatcccagctattctggaggctgaggcgagataattacctgaacccaggggaaggaggttgcagtgaggcaagatcacgccactgcactccagccctgggtgacagagcaagactctgtcccaaaaaaaaaaaaaaaaaaaaaagaagctcttcctctgtttcatattttatgaatattaccctcaatacattttctgcactcctaacttcaacttggcagtcacttcccaggagatgcagactgacataggtattttactcaactttgaagtcttcagcatcagcctgatacacatataagaaggtgtcatccattcatccatcattcattcatccattcattcagtgcttgtatgacttcatcccgtatccggtactatatggcacagtaagcatagtgataatattaataaatgtgcagaatctgccctcagtaagaaagcctatcacacagtgagttgttagagggaagtaataccccctgggggtgactgtgatggatgagagaggacagccacattatctggtttgtggaccacttacagcaggggtccccagcccctgggccacagaccagtacttatccatggcctgttacgaacagggctgtacagcaggaggtgagtgataggtgagcaagtgaagcttcatctgtatttacagtcactccccatcgcttgcatgaccacctgagttctgcctcctgtcagattagcggcggcattagattctcacaggggtgtgaaccctattgtgaactgtgtacatgaggtacctagactgcacactccttatgaaaatctaatgcctgatgatctgtcactgtctcccatcacccccagctgggaccatctagttgcaggaacacaagctcagggttcccattgattctacatgatggtgagttgtacaattctttcattatatattacaatgtaatcataataggaataaagtgcatagtaaatgtaatgcacttgaatcatgctgaaaccatccccacccaccaccagtccatggaaaaaccatcttccactacaccggtccctcatgccaaaaaggttggggaccagtgacttacaggatgcctggtccccattggtcttcagggcaatgtcgtttctctcctggcgccccttggttcctgaaacttcttccatcttgtggatttctgacaagcagagtttggggttatagtggaagaagagtttcccctgagtgatggtgaggttgtgtttgctccagtcccagagctgccttaggttctggttgtccaaggcatagaaggagtagttcctatggaaaaaacacacacatctagtcattcaacggctggtcttctacaactccaagatggtgtggccatgctcggagttgatcttgttcagtgctacgtgcctaatcctctccacttgcttggcacatactcaacacatatttgttgaatgtggataacagaggaagttgaggaagttttcatggccaggaaggaggctcagctcagtcttgaagaggggtggtgagtctgtgatggactgaggaataggttttgcagaaaccaatttctgcaaataggggaaatactgataacacagaggcacctaagctgagttcagggaagagcaaagtagcctgttttggccaataggtgacaggaaatagctgtagttgcaatggaccagaccctctagtatattgcatgccagaccaagaccaagaacatgtggccatccttaataaggagaaaggagccattgaaggtttttgtttgtttgtttgtttgttttattgagatggattctcactctggtgcctaggctggagtacagataatatagtctaaactatattgtttagaccaccttctcaagtcacttaccagctcatgttgattaacatgtccttttgtccctttccccatttgctgtctgttctacagatgtgaggctggggctgaggcagccatcttgtgaccatgaggagcacaaagatggaaagaatctgggtcttccacagacctcctgcctatgagtcaatcttgatctagctagtttgagtttctgctgttttgctaatagagtttctaggacctcaaggagaaggttggaatatactggaatatactgagatggagtccatcccagaaattaggatggacaaccgggactaagagggaatgttcattttatgcatgccaaactctactcacaatgcagcccaaacagcaaatttagcaaaaattccagcctgtacccttggaggatgggcaccaaggttgggctgctcccacttttgtttctcaagaatgactataaaaaagcttttacaatttttggctggatggacctttaggcacattccaagttcttttttcccgaggttttgccagatatacttttatttgttttttatttgtttttatttgatttttaaaaaatccttaagtttttccttttcttttctttttttttttttggacagagtctcactctgtcacccaggctggagtgcagtagtgtgatcttggctcactgcaacctctgcctcccaggttcaagctattctcctgcctcagcctcccaagtagctgggattacaggcatgcactatcacacttggctaatttttgtacttttagtagagacagggtttcaccatgttggccaggctggtcttgaactccccgcctcaagtgattcacccacgttggcctcctaaaatgctgggattacaggcatcagccaccacacctggccaaaaaaatccttaagttgttctaatacacgaacttcctagttagcactcaggccatacacacaatcaggcccacgtacccaatttccaaggtctctcctcgaatcagacgtaacttccggaagaaggaaagtgacaccagagcgtaggatcggcggatttttagataccctgaaatttcttcaatgaggccgaggttggcttctagctcagctgccagattgtctaaggaaaggagagaatatccagtgggtttctatagacatatttcaatcttctcatgattctccatggtgagaagataaccctcaggctgcaaatgactggacatacccagctcaaaactcatcatgcttagaacacaatctgaagtccttagcattccttaaatgggtcaagcatacttctgccccaggaccttggcactggctgcgtctgttgctcagaatattattccaccatatatctccttggcttgttccatcatcatctcaaaccctcctttcccataccagagacttctctaaaatagcaacccccagcttggtgctggtggctcatgcctgtaataccagcaccttgggagggcgaggcaggtggatcacttgaggtcaggagttcaagaccaccctggccaacatggtgaaaccctgtctctactaaaactacaaaaaaaaaaaaaaatagcaacccctgttagtctccattttagaggttgacaaatgacagcccactggccaaattctacctgttttgtaaataaagttttattggaacaaagccatgcctgctagctgacatgggtctatggctgttttcatattacaacggcagagttgagtggttacggcagagactgcccggcctgccaggctgaatatattcatgaaagagccctttatagggaaaagttgcccatttccattccacctattaccctgctgcacttcccttcacagcacagaccacaacctgaccttacaatatctgtcgatttacttatgcgcaaaaatccatcaaggtaaggactttcccttactcactgtgagtattcagtacatgttcgctaaagaaataaacaaaggaatgcctttttgcctgacatggtatttcttttctttttttttgaaatggagtcttggtctatggcccaggctggagtgcagtggtgtgatctcggctcactgcaacctctgcctcccaggttcaagtgattctcctgcctcagcctcccaagtagctaggactacaggcatgtgccaccgtgcccagctaatttttgtatttttaggagagacaaggtttcaccatgttggctggtctcaaacttctgacctcaagtgatccgcccacctcagcctcccaaagtgctgggattacaggcatgagccacagcgcctggctttttttttttttttttttttttttgagatggagtctcactctgtcgcccaggctagagtgcagtggcgcgatcccagctcattgcaacctccacttcctgagttcaaacgattctcctgcctcagcctcctgcgtagctgggattacaggcacgcaccaccaagcctggctaatttttttgtatttttagtagagacagggtttcaccatgttggccaggctggtcttaaacttctcacctcacgtgatccacctgcctcggcctcccaaactgttgggattacaggcatgagccactgcacccggccctgagatttatttctgaaaacacagcctgcagttctgcaatagggcatattgcttgattgttaaaaacgacgattccaaagccaggtggggtggctcatgcctgtaatccctgcactttgagaggctgaggcaggaagattgctcgagcccaggagtttgagaccagcctgggcaacatagtgagaacctggccctggaaaaaaattaaaaaaaaaaaaaattagcccggcacagtgacacctgcctgtactcccagctacttgggaggctgaggtaggaggactgcatgagcccaagagtttgaggctacagtgagctagagttgccccactgtactccagcctgggcaatggagcaagaccccatctctaaaaataaaaataaaaataaaaataaatgtaaatgcagattcctgatgccccaactcccaaagtagaaaatgagaatctcaaggttagtaaggccaagactgagctgttcatttcaggttttgaggcagactcccagcatggttctatccatgggggagccactgaacgaccatcctaaaagtgctgtaggagcacgcagcagggtctgcactgcttttcttccccgctcacagctcagagggacatggagcccaacaggcacccccgacgcccacacagagacactcactgcctcctcgaatgttgatgatcagactcccgttgatgacggtgcatcctcggagctcctgggcagacgtcaccgagtcgatggtcttctcgccttctaggaggtggcacaccttgggacagggacccaggcatggggtgcacagcaagctaaggacggagcagagagagagagaaagagaaaggggaggggggtgtcacggtatccaaggtccttcagacatctcaggcatctttctgcctgatatggtatttctttgtgtgtgtgtgtgtgtttgtgtgacagagtctcgctctgttgcccaggctggagtgcagtggtgcgatctcagctcactgcaacctctgccttctgggttcaagagattctcctgcctcagcctccacagtagctgggattataggtgcccgccaccgtgcctggctaatttttgtatttttgagtagagacggggttttaccatgttggccaggctggtctcaaactcctgacctcaagtgatccacccgcctcggcctcccaaagtgctgggattacaggtgtgagccactgcacccggccctttctgcctgagatgatatttctgaaaacacagtctgccgatctgcaataggacatatcgcttgattgttaaaaatgtagattctggagccgggcgtggtggctcctgcctgtcattcctgcactttgagaggccaaggagggagggttgcttgagcctgggagttcaagatcagcctgggaagacagcacactatgcagggtctcaagtgatggcataagtccatcatgctacggcaaggtcttctgacctcagcattgttcacatttggggccaagtaattctccactgtggtagtgggggtggcgtcctatgcattggaggatattgagcggcatccctaggctccactcacgagctgccagtagcatccctcccacaagttgtggcaattaaaaatgtcctccaggccaggcaaagtggctcacgcctgtaatcccagcactttgggagtccgaggcgggcagatcacctgaggtcaggagttcaagaccagcctggccaacatggtgaaaccctgtctctactaaaaatacaaaaattagctgggtgtggtggcacgtgcctataatctcagctactcaggaggctgaggtaggagaatcgcttgaacctgggaggcagaggttgcagtgagccgagatagcaccactgcactccagctgggagacacagtcagactccatctcaaaaaaaaaaaaagtctcccaacattgccaaaagtcccctggggagggaggatgccagattgtccccagaaaagaaccactgccttaagtgagagaattatgccattaccctatggttgcaggtcctcttgcttttaccccaaagtgacaagactcatattttaccccaaagtgatgggacaggactcctgctggaccccacagtgatgggattcacaccatatcccatggaggcaggaccatgatctaccctgtgcgtgacagcaatgggactcatagcattatcgtggcgatatgttttggatctgtgtccccacccaaatctcatgtcaaattgtaatccccaatgtgggaggtggggcctggtgggagatgactggatcatggtgggcggagttctcatgaatggtctggcaccataccccttggcagtgtatagtgagtgagttctcacgagatctggttgtttaaaagtatgtagcaccagccgggcatggtggctcatgcctgtaattccggcactttgggaggccaaggcgagcggatcacttcaggccaggagttcgagaccagcctggccaacatggtgaaaccccgtctctactaaaaatacaaaaattaaccaggtgtggtggtgcccacctgtaatcccagctactggggaggctgaggcatgagaattgcttgaactcaggaggtggaggctgcagtgagccgagattgtgccactgcagcccagcctgggtgacagagtgagaatctgtctcaaaacaaacaaacaaaactatgtagcaccttccccctttctctcttccttcagtcatgtaagatgtgcctacctcccctttgctttccgccacgattgtaagtttcctgaggtctccccagaagcagaagctgctatgcttcccgtacagcctgcagaactgtcagccaattaaacctcttttctttataaattacccagttccatgtattctttatagcagtgcagaaatggactaatgcatgtggtaataagaatgtgccgttaccttgagatgatgggcctgatgtggcagaactgacagttaccccaacgtggcagaattcaacctgctactccaaggagacaggacatttgctgttctgtgtgggatgtgatgcaactacggctgtaacatgaccccatgtttaatggcaagtgacttgggcagcctttggttttgccagcctgcagcctgatgccatcaaactcacagcccccaggagtcctttgggaaccagtcctccccaacacggggtctctgagatcagttcttggttgccaaagcccttctagatccaggatgggcacaagatccaagccaagctgagcaccaccttctattcctgtgggggctcagaggtggtgggtacagaacttaagtcagtgcagtgagggttttgctagaacatgctggaaggggaaattgtcttccttctggagtatctaagggttttgccatcttgctagcatggggtgaagggtgagggagaagctgcctgataacaaaaccaacaaagaggaaaataaagatgaaggagactgatcaggtacatcgcttaagcttcttgatacagctatacctgaaccaactccctgaactttttggttatgggtaccaacaaactcctttaatcttggttaagtcaatggtttttttgttttgtttttgtttttgttttttttaagatggagtctcactcttgttgcccaggctggagtacaatggcacgatctcggctcactgcaagctccgcctcccaggttcaagtgattctcctgcctcagcctcccgagtagctgggattacaggcatgcaccaccatgccccatctaattttgtattttttttttttttttttttttttagtagaaacagggtttctccattttggtcaggctggtctcgaactcccaacctcaggtgatccacccgcctcggcctcccaaagtgctgggattacaggtgtgagcaaccgtgcccggccagttaagccaatttgagttggggttctggtgcatgaaaccacaagattcccaactgttacagtctccatttcttcatctgaaaataacaccaccaacgccacagcttgtgatgaggaactcaatgaagcataccacaaaagcacttcgcacacagaacgcaattttatccgttgctacaagggtcattttttattggtggcatccttgttgctgctgctgttgttctcacactcctgggtattcaactcttcagagtgatttttgtgactgtaggatcataaagtatgtatctggtcttcatcccggttcttggcacagagcttcaaaaacccttggaactttctgagtcacaggaatgcttttgttaggagtgttaggaatgtcggggtgacttgtgggggggggggtgcctagataacatgagggtggggggcggtcaccagaaagaacaaccctgtgatcagagggttggggcttttaggacctccagggagatgagggggctggaaatggcagtgttgaatcacatggtcaatgatttcaatcaatcacgcctaaggaatgagactccaattaaaactctggatactgggccgggtgcagtgcctcacgcctgtaatcctagcactttgggaggctgaggcaggtgaatcacgaagtcaggagtttgagaccagcctggccaacatggtgaaaccctgtctctactaaaaatacaaaaattagccgtgcgtgatggtgcatgcctgtagtcccagctactcggggggctgaggcaggagaattgtttgaacctgggatgtggaggttgcagtgagctgagattgagccactgcactccagcctgggtgacagagtgagactccgtctcaaaacaaacaaacaaacaaacaaaaactctggacgctgaagctcagtagtacttcccagctggtggacacaccagtatgtcaagagggtgatacatgctgttgccacgaggaggcaatatggaaattctgcatctagaactctcccagatcttgccgtatgtgtatcctttataataaaactgtaattgtatagcagggtttttaaatttgagacaagatcttgctctgccacccgggctggggtgcactggcacaatcttagctcactgcagcctcgaactcctgggctcaagcgatcctcctgcttaagcccctcaagtacctgggactacaggcatgcaccccctcacctggctaatgtttttaaatttttgtagagatgggatctcactatgttgtccaggctggtctcgaacctctgggctcaagtgagcctcccaccatggcctcccaaagtgctgggattacaggcatgagccaccacacctggccaggtttattttcattctgtgagttccttctagtaaattatgaaacccaaacagtttgtgggaatcccccaatttagagccagttagtcagaagtgtgggtggctgggggatccccaagatgctgccagtgtctgaagcaagggaaatctcatggagggctgagccttaaacttgtggcgtctgatgctaactttggaggaggatggtgtcagaacggtgttgcaagtacacccaggtagtggcagaacagctgaggcagaaacaaaatactgaccaaatgtttgacttcttttattgcctctattcttattatgtggcaggcaatgctctaagcctggagttggcaaacagtgggctgggagccaaatccagtaggccacctgtttttgcaaataatatcctattggaatatggccacatttattggttagtacatcgtctaaccctgctttcacgctgcaaaggcagagttaagtagctccaacagagaccatatggccctgagagctgaaaatatttactatctggcccttggccaacccccgttctcagctgccggtatacatgagtgaacaaagcagataatatgctttcccagtgggaaattataaatgaccatgagttctttgcagcctctcccaccaagaagtggagtctatgttcccacctgttgaatctgggcttggccatatggcttgctttggccaatggaatatttgcaaacgtgatacaagctgaggcttgaaaagcacttgaacattgaggtctgcccttcctggctgctggggtaagagacttatggagagagacccccactgaccatcaaagacacaagaggctcccctaaaccatcagccgtagctaaacaggcccaggccagacaaaccttcagtcaacacatgaaatcatcagagctcctaaaggagtgttttaagccactaagcactgaggtggttttgttacgcaacaagagctagctgatacactcacaaagcttatcatctggttggggagagtgaataaattgacaacaaaggctaggtacagtggctcaggccctgtaatctcagcactttgggaagccaaggtgggaggatcacttaaacccaggagttcaagacgagcctggggaatatagcaagacccccaacactacagaatttttttttagccaggtgtggtggtgtgtgcctatatagtcccagctactcaggaggctgtggcaggaggatctcttgagcccagggggttgagaccacagtgagccatgtgggtgccactgcactctagcctgggtgacagaccaagaccttgtctcaaaaaaaaaaaaaaaagacaaaaatatcagctagtgacaaatcgaagagttaaaactaaatgatgtgacagagagtgcacggatgattgactcagacgggaaggatttgccaaggaggtgacttttaagctgccatctagatgacgaggggaaaaagtggatcattctcaaatgcagggacaagcattataggaagagggaacagctaattgaaaggcacagaggaaagcggatgtagcaagttgcaggaaaagctcctgcggtaacgaccaccacggccagggggcaccggaatgaaatgagaatgagaactggccgagccctcccgatgaggagtttggattctgtccattggtcttgggaagccaccggagggttttagggaaggacatggcatatgatcagatgaccacttttattttttcttttgagacagagtctcactctgtcaccgagactgcagtgcagtggcacactctcggctcactgcgacctccacctcccgggttcaagcaattctgctgtctcagcctcccgagtagctgggattacaggcgcccactgtaatcccacgcctggctaatttttgtatttttagtagagatggggtttcaccatgttggtcaggctggtctcgaactcctgacctcaggtgatccacccacctcggcctcccaaagtgctggggttataggcgtgagccaccgcgcctggcccaggtggccactttttaccagtgtcactagaatggaagcaggagcaaagagattgttcaaggggactgggtcagaccagacatgatggtgaaatagatggaggtgtagacaaatttgagacctcagcttaataggaagaagtgagagaggccaagaagaatcaaggattttaggtaattctccccttcccagtggataccccatacgcattgaaaatttattcatcacaaatatctggtccttctcatctcaggaagcagcactgtgctattacatcccagcaggtactttggaacgacagtagatggtgagacctttttttttttttttttggagatgcagtttcactcttgtcacacttgcctgggggctaacgtgcaatggcgtgatctcagctcactgcaacctctgcctcctgggttcaagcaattctcatgcctcagcctcccgagtagctgggataacaggtatgcatcaccatgcccagctaattttttttttgtttttgtatttttagtaaagacggggtttcaccgtggtggccaggctgaccttgaactcctgccctcagatgatccgtccacttcggcctcccaaagtgctgggattacaggcataagccactgtgcctggccaaggccttttaacatgggttcccagaactctgctctgaaaacatcaagaactccttcccagataagccaccagaatggaagaaaacatctggccctatttgatatcaaaccacattagaaaatgccacagtacgattaagtctttcataagataaaaagaaaagcttcaggccaggtgcggtggctcatgcctgtaatcccagcactttgggaggccgaggtgggtggatcacttgaggtcaggagttcaagaccagcctggccaacatgatgaaacccggtctctactaaaaatacaagaaaaatttagctgggtatggtgacagatgtctgtaatcccagctacttagaggctaaggcaggagaatcacttgaacccgggaggctgagttgcagtgagccaagatcgcaccattgcacttcagtctgggcaacaagaatgaaactccatctcaaaaaaacaaaagcacaaacaaaaaaaaattggccaggcttgctgcctcacacctgtaatcccagctacttgggaggctgaggcaggagaatggcttgaacctggaaggcagaggttgcagtgagctgagatcatgccactgcactccagcctgggtgacagagtgaggctctgtctcaaaataaataaattaattaattaaaagcttcagaaataaaaatattaatttttttaaacctacgcaataaaatacggtgacaatgcacccccctctcctttgttttcttccgttcaggaaaggtcccagataccaaggatgtgcggtcaatttctcagggtttctgttttagcatctcccgcatcatcagtgagaaaatcaaaggaggttgctatatttctcaggccattgttaaggtgagggaaaaatgccttttatttaaggccaatgtcttttaaacaaacatcttgccagaagatattaacccattttttttatttcaattgtgattttaaaaagaaagaaatgaatcaaaaggaatatggtcatttcctcaatcttgggaatacactggccaaaaaaaaaaaaaaaaacctaaaacaaaagtctgtctggtatgaaaaggtgatttatagacccttttggtcaataaagccaaaaggtttttttggtaggtttttatcaacaacgagcaaaacaaaacatattgtacttgcaggtttcacaaacactcaaagaaagagtcataagaactgaaattacagcttgttttccttcccgccctctccacccagggaaatacaatttcccaccccaacactctcgcttggctaattctcaagtctgaagaggaagatactttacgtaagcaggtcagctcaaggcctcttgatgtgtgtctgtttctgatttgtttttgtgttgttttgtggtgtgtgtgtgtgtgtgtgtgtgtgtgtgtgtgtgttttaaaacaaaacataaaacctcaatacaaaaaccaggaaacagatttttgcaactcagttacggccccaaaatagctcatggaagaagctcacagtacgaacagaaagtctgcgatgtgcgtaggaaatctgactctgtcgaagagagaaaaccctgctatttctcacccaaacggcaggaaatggtttgattatactgtccttcagagaacagcaaagccctgagaataatgcagaagcgagtctcttcctcctggagacagtatgttctgggctaatcttggcacaccaccaggctacaggtcagggaagacacgaaagaccttggtatatcctttatgtgacaatgatgaagctacatcagtgaggacaggccacgtggaggattttagggaaaaccaaggactctgtccttattatattttcttgttctgaagccaaccacagaaagcttagaactgaggtccacaatgccagactgggtgcggtggctcacacctgcaatcacagcactttgagaggccaaggcaggtggaccacctgaggttgggagttcgagaccagcctgaccaacatggcgaaaccctgtctctattaaaaatacaaaaattagccgggcatggtggcaggcacctgcagtcccagctgcttgggaggctgaggcaggaaaatcgcttgaacccaggaggcagaggttgcagtgagccaggttcgtgccactgcactccagcttgggagtcttgcggcaagactccatctcaaaaaaaaaaaaaaagaatggtgggcacaatgccagaagtatatactatctggtcctttagagaaaaaggtagtcaactcccactcccaagcccaggaccaaaacagggtgcaaaagtagcatctgagagcagagacctcactcatagccaattaaccctgggtttgcacacagttttaacaagcggcatcgtcacaaccaaccccacgttccttctcctctcggctgccccccagacccacatccagaactcacttgctggaattcatcgtgtacccggagggacactcagggatgcacttgttgttgtgaatgacgtactggtggcagccctgcctccgcgagttcttgcatttgtggtgcaggtcctggcagaagctgaagttcacacagcgccagtcctggaagtggtagtacgggggcgggcaggtctccacacacctgccgtccaggtagaagttgcggcaggccacgcacttggtggggtcgtcgggctgagaacagttgcccaggcactcgctgtggcaacagaggccttcggcggtgcagccgtgtgacttacagatggtcgggcaaactggagagagagagagagagagagggaaataaataaataaataaataaataaataaataaataaataaatggctttgtccaattcctgtctgcatatgcagcaattctggatcagacagtgaaagccaaccaaacactaacagtaaaagcggcacgtctacatcattacccacatgtcagacacatctattaactggtttaagcctccaaaccattggtgagcttgtaaatgtttaacagctgcctgagggaggggcccagggaggcccagatttatatagcatttgccgatttccatggtgtaaatattcctaccagtggtggatttcaggccaccaacatgaagttactaaacataagctgacaaaagatacacagtagcattcctctaagtagtatttataagtatacacaaaatgtatctactattgacacaaaagtagtaaataacctcaacagcacaaataataggaaaacatcgtatgatattaggaggtggtgagttttgagtatttgttacttttaaaaagctttgttaatttaaaaacttttgtttttaatgtaatttgtttaactgtaggtttatgtaatttttatgaatatctatgtttaacaaatggctcacaaattgcctgaaaatttcaccactggctccagcaagccaactccagcatgctgctgcaccccacatgtgaagtagatacactgttagctcctttatttttttgttttacaaatggggaaactgaggtacagggaggttaagtaacttgcccccaaaccactgattgcttcaacagacatttgcttgcactaatctagatactgtggccactgtggggaaaaaagtggctgcagatcctgcctttgggagcacaaggtctaatggaggagacatgttagttacttaaacatgcaaatgtggctcggtgtggtggctcacgcctgtaatcctagcaatttgggaggtcgaggcgggtggatcacctgaggtcaggagtttgagaccagcctggtcaacatggtgaaaccctgtctctactaaaaatacaaaaattagctaggtgtgctggtgcatgcctgtaatcccagctgctcaggaggctgaggcacgagaatcacttgaatctgggaggtggaggctgcagtgagccatgatcgtgccactatactccagcctgggcaacaagtgcaaaattctgtcaaaaaaaaaaaaaaaaaagagagagagagacaaagagagagagaaaaggaaggaaggaaggaaaaaaaaaaggctggttgtggtggctcatgcctgtaatcctagcactttgggaggccaaggtgggcggatcacctgaggtcaggagtttcagaccagcctggccaacatggtgaaaccccatctctactgatgatacaaacaattagccgggtgtggtggtgggcgtctgtaatcccagctactcaggaggctgaggcaggagaatcgcttgaacctgggaggggaggttgcagggagccgagatcatgccactgcactccagccttggtgacagagggagactctgtctcaaaacaaaaaatgaaacaaaacaaaaaataagaaagaaagttggggagtgttcttcaccccaaatccccagactgtgattctcagcacagtggatcccaccggccaaactcagggaacagaagtggccccagaagctacatccatatatgaacagcaccatctggtcgaaatttctgcgatgacggaaatgttctctatctgggccatccaacatagtagccacttctcccctgtggcttctgaatgtgcttagtgcaactaggaaatccaattttttttttaattgtggtaaaatacacatagcataaaattcaccattgtaatcatgtttaaatgtatagttcagtggtattaaatacttttatgtggctatgcaaccatcaccaccacccatctccagaactttctcaccttaaccaaactgaaactctgcccccatgaaacagtcacactcatcctcctccccaactcctggcacctgccattttactttctttttcttttctttttttttatttttattttttgagatggagtcttgctttgttgcccaggctggggtgcagtggcgcgatctcagctcactgtaacctctgcctcccgggttcaagtgattctcctgcctcagcctccagagtagctgggattacagacgcccaccaccacacccagctaatttttgtatttttagtagagatggggtttcaccatgttggccgggctggtcttgaactcctaacctcgtgatcctcctgcctcagcctcccaaagtgcagggattacaggtgtgagccactgcgcccgacatcccattttactttctgtctctgtgactctgatgactctaggaacctcatataagtggaataatataggatttattcttttttaaaaaatttattttgagatggagtctcactctgtcactcaggctggagtgcagtgactcgatctcggctcactgcaacctccacctcctgggttcaaggaattctcctgcctcagcctcgagtagctgggattacaggtgcccaccaccacaccccgctaatttttttgtatttttagtagagacggggtttcaccgtgttggccaggctggtctcgaactcctgacctcaagtgatccactcaccctggccccccaaagtactggaattacaggtgtgagccactgtgcccagcctagctgcagtattttacattcccaccaacagtgtaccagggctccaatttttaccaaggaacaaaacttttaactgcatttcattttaatttcagtttaaaatttttaaaaagttttacattgatacagaatattttacacatttatggggtacttgtgatattttgtcatatggataaaatgtgtaacgatttcttttttgggtgtgtgatggggtctggctctgtcacttaggttctggggtacagtgacacagtgacagttcactgcagcctcaatctcctgggctcaggtgatcctcccacctcggcctcttgggtagctggaataatggacatgcgccaccacgcccagctaagtgtttaattttttgtagaaatggggtctcactatgttgcccaggctggtctcgaactcctggctcaagcgatcctcccacctcagcctcccaaagtgctgagattacaagtatgagccactgtgcctgacacaattccaatgtttactagccacagatgactaccgtctcccagacgagacagttcaggcatacagaataaaagccaactccctacaggccttggggggtctaatccctgccagtcttgctaaattcttctcccaggctggcctcctttctgcacctcccacccacacacacccaggctcagccctaccttaggaccttgcacaagctgttctgggtggagcaccctggtcccttgtccccttgtgacttgctcctttgcatccttcaggtccttacacagatcttccctgacttccccagcagaagtcgcccttcctgctccattcataagctaacacattatctcattacattttccttatggcatggatcactcttgaaaattatcttggggctgggcgcgggggctcacacctataatcccagcactttgggaggctgaggtgggtggattatttgaggtcaggagttcaagaccagcctggccaacatggtaaaaccccgactctactaaaaatacagaaattagctgggcgtggtggtgggcgcctgtaatcccagctactcagctactcagaaggctgaggcacaagaatcacttgaacctgggaggtggaggttgcagtgagctgagatccactgcactccaggctggctgacagagtgagactccgtccaaaaaaaaaaaaaaaacaagaatattaggaagttctaatagggctaagcacagtggctgatgcttgtaatcccagcactttgagaggctgaggtgggtggaccacttgaggtcaggagttcaagacgaccagcctgaccaacatggtgaaacccgtctctactaaaaatacaaaaattagtcgggtgtggtggtgcttgcctataatcccagctactcgggaggctgaggcagtagaatcgcttgaacgcaagaggagtttgcagtgagtcaagattgtgccactgaactccagcctaggtgacagagcgagactctatctcaaaaaaaaaaaaaaaaaaaaaaagggaggggggattgttaataagagtcccttccttccttcttaaggctgttgcaagaaataaacaggatgacgtcagtaacacatcagattctttgatagagacatttttaggcttgatagaaattaactacagagggtatctataattatcataattatcaacatcattaacactgatctgtctgtgggaacctgagggctgaaattcaattgaaggaagcaatatacaaggcagacaacaatgatccaggacccacggagttccagcactctggcaaggaaacacacacacaagaggaaggggcttgtttcctgggctggagccacttcagagggtcagccctttcattcaaaagaggcgtcatcaatggcctaacacaaacctctcaaacacataagtccttccggcctagacaatgggaagaaaaattatccaaccattgcaaacaaggccagaggctgcgagactttgcaatcctgtgttggagccctagctgacaggcctatctgagctatttcatttgtcagcacaggagttggtcaactttttctgtaaagggccacaagcaaatacttgaggctttgcaggacatatggtgttggttgaaactactcaactctgccacgatggcatgatagcagccacagacatatgtacatgaagaggcatggctaggtccaataaaactttatttataaaagcaagtgatgggccagatagtttatcaacctgcactagttaaatgtacctgtaattgattttactattactttttttttttttttttgaaaccgagtcttgctctgttgtccaggctgaagtacagcggtgccatctccgctcactgtaaactctgtgtcccaggttcaagcaattctcctgcctcagcctcctgagtagctgggattacaggcacccacaaccatgcctggataatttttgtatttttagtagagactgggtttcagcatgttggccagtctggtcttgaactcctgacctcaagtgatctgcccaccttggcctcccaaagtgctgggattataggcatgacccactacgcctggccgattttactatttctattaggaactagactcaaggaaattagagttaacttacagacagatatgctacaaattattttcatctcagagaaaagatactctcagctgggcatggaggctcatgcctgtaatcccagcactttgggaggctgaggcgggaggattgcttgagcccaggcattcgagaccagcctgggtaacagagtgagatcctatctctccttgccgaaaaaaaaaagaaaaaaatcatccccaaagattacagttttattgtcctatgggacattaagcagcctcacagctaacactgccttcttatttcagtgactatacatgttttggctttataatcctgctgttccctcactaatgggttaaataaacatgctgacctgtgttctttggtggtttttttttttttttttttttgagacagagtctcactctgttgtccaggctgaagtgcaatggtgagaactcagctcactgcaacctccgcctcccgggttcaagcaattctctgcctcagcctcctgagtagctgggattacaggcgcccgtcatcacgcccagctaatttttgtatttttagtagagatggggtttcaccacgttggccaggctggtcttgaactcctgacctcgggatccacccatcttggcctcccaaagtgctgggattacaggcgtgagccaccgcgcccaaccaattctttgaagactatccttcgaacactataagctcattccaggtgtttccaactctgtagggagatgttgatcaaactacaaaatttcacttaggagaaataagctttagttatgtattggacacaatggttgctataataagtaatagtgcactggacatttcaaaattgccaaaaatgtagatatttttaaccataaaacaatgataagtatgtgaggtgatagcttttaaattggcatgacttagtaattctacaatgtaaacagatatcaaaacatcacatggtaccccataaatatgtaacatatacaattattatttgtcaattttaaaaaaatagaggctgggaacggtggctcacgcctgtaatcccagcactttgggaggccgtggcaggtggatcacctgaggtcaggagttcgagaccagcctggccgacatggtgaaaccccatctctactaaaaatacaaaaattatacaggcgtggtggcaggtgcctgtaatcccagctacttgggaggctgagacagcagaattgcttgaacccgggaggcgggggttgcagtgagccgagattgtgccactgctggaagagagagtgagactctgtctcaaaaagaaagaaaagaaaagagaaagaaagaaagaaaaagaaagaaagaaagaaagaaaggagggagggagggagggaaggagggaaagaaaagaaagaaaagccactcggggtggccactgcaccccctagctgagtgggagtcctctaaactggtgctggacgtttccacatactcttgctccccatactggttcctctgaactcggattgttagacagaatgtgaaaagctccacatgaaaatcacaagcctgccaggcgcagtggcttgtgcatgtaatggcactttgggaggctaacacgggaggatctcttgagtccagtagttcaagactagcctgggcaaaatagccagacccctgtctctacaaaaataaaaaaattagccaggtgtgatggtgcacacccgtaaaccaatagtcccagctactcgggagactgaggtgggaggattgctacagcccaggggtttgaggctgcagtgagctgtgactgcaccactgcactccagcctgggcaataaagcaagaccctatctttaaaaagaagagagagagaaaagaaagagagagtgaaagaaggagggaaggaaggaggaagggagagagagaaaagaaagagaaagacagaaagaaggagggaaggaaggaaggaaggagagagataaaaagaaagaaggagggaaggaaggagggagggaggggagagagagagaaagaaagaagagggagaaagaaagagaaagaaagaggcaggaagggagggagaaagaaagaaggaaagaaagagagaaagaagaaagaatacagaaagagaaaaaagaaaagaaagagggagaaagaagaaagataagagagagagaaagagaaagaaaaagaaagacagagaaagaaaagaaaaaagaaagaaaaagaaagaaaggagaaagaaaagaaagagaaagaaggaagggagggagggaagaaaagaaaagaaaagaaaagaaaagaaaagaaaagaaaagaaaagaaaagaaaagaaaaaaatcacaggcagcccaggctggggaaagggcatgacacagatgaactagccacaaaacagcagcttcttctggtgagagagaccgcaaagtgaagacattatgaaagccacgtgtcatgcaagatgagaaacagccccagtggaggacggggttgactttcctctccctgtgcccctgacctgatccccctcattgacacgtaatgagcccaagtgtccgttcctgcccaaattctggtttggggtagggacagtcagcagcccaggctatgtctgccagacaagatggcagacttgcaggaaaatgccaaaccgtccgggggctgtcactccctcacacctgcacacaagtgctgctgtgtatgtagggaacatctacccagacctcccctctccaaaaatgcaagttctgtgtccatccgctgtctccccttcaaagccacattgagctgctggtcccaattttcccccagttctccctaaacctcccaaaagctcctgggtgagcacacagaagcaactatcatcttcctgaaactttcagctgcggtggctttttcactatacactgctgagaagatcagggactaaaatctaactaagttgacggaggagaaaggagaccgctgtgtcagagtcctctggtggaccctccccaagaaagacaatgtccccactaaaggaccccttccctagacagagggagtcacagaaacaccaatttgcttcagggaggcagttcaaagcaaaggaacgaatcttgcaccaagaggcaagtgcaatttgatgcagtatttcttttttttctttttttttttttccccagatggagtctcactcttgtccctcaggctggagtgcagtggcacgatctcagctcactgcaacctccgcctcccgggttcaagagattcttctgctcatgcctgtaatcccagcaggctaaggaggctaagcctgggaggctaaggtgagcggatcacgaggtcaggagagccaaaccatcctgaccaacatggtgagactccgtctccacgaaaaatataaaaattagctgagcatggtgtcgcgcacctgtagtctcagctacatgggaggctgaggcaggaaaatcacctgaacctggggagcggaagttgcagtgagctgagatcacgctactgcactccagcctggcgacagagtgagactccatctcataaaaaaacaaacaaaaaaattaggggcaggaggggggaggacacatgggacatatgtccctctgaaagggacacaaaaaagtgccctattttatttttattttttactatgtatgtgtactatcctgtcaaaactgacatatatttggaaatacatatttttttcaagtagcttcttctttcatttatttatttagagacagtgtctcactctgtcgcccaggctggagtgcagtggcatgatcttggttcaccgtaacctccgcctcccaggttcaagtgctcctcctacctcagcctcctgagtagctgggactacaggcgtacaccaccatgcttggctaatttttgtatatgtatatatacatttggtagagatgaggtctcacaatattgcccaggctggtcttgaactcctaggctcaagagatccgctctccccgagctcccaaactgggcataggcgtaagccacaatgcccagccaggaaatacatttttcaaaagcctctgctagacagtaaacaatgttattgatcagttacatgattctactcccaaatattctaataatgacaggcatcggtgagagcttttacaaaggttctcttaaaatcatctttgttggctgggcatggtggctcacgcctgtaatcccagcactttgggaggctgatgcaggaagatcacttgaggtcaggagttcgagaccagcctggccaacatggtgaaacactctctattcaaaatacaaaaattagctgggcgtggtggtaggcacctataatcccagctacttgggaggctgaggcaggagaattgcttgaacccaggaggcagtcgttgcagtcagccaagatcgtgccactgcactccagcctggacgacagaatgagacttcatctcaaaaaaagaaaaaaaaattatctttgccttattacaaaatcaatatggggctcaggggtgaagtgtggagtgtgttttaataatagctttgcttttttttttttttttttttttgagacaaaatctctttctgtcacccaggctggagtgcagtggtgcaatcttggctcactgtaacccccatgtcctgggttcaagcgattctcctgcctcagcctcctgagtagctgggattacaggcacacgccaccacaccaactgattttttttttttttttttttttagtggagaagcggtttcaccatgttggccaggctggtctcaaacacgtgacctccgtctgccttggcctcttaaagtgctggtacaggtgtgagccaccgcgccaggccagctttgctcttttatggactattcaacaaattgttagcatttctcttttttctttttttcattcaacaaacacatgtcgaatgtcccagtgtgccaaatcataggaaacctgttctcgtattaaatgaaaaagcatcagaacatagatgacacaaaaaccccatcccctgtcctcgagacatccaggtttagcattgtcctcagcccccagcagcatcccctcctgcagggggaaaagaaaaggaaaaaatcccacagtactagaaaatggcaagagtaaatcttgttgtgggaaacttttcattcaggtatatgcatgtcttgggtactgagccttacgggaaatgtatttcttcttaaaaattctagttaaaaatacttcaagtaacattgcccacaatagtgggacaaggcaacaacacgtacttcccattatgaggcaatgaaaaagacaaaatatttgtgtagctttctttccatatattactaaccctagcttgaggtcattcgataaaataactggcctgtgctcttcaaaactgccaatgttggccaggtgtggtggctaacacgtgtaatcccagcactttgggaggctgaggcaggaagatcactggagatcaggagttcgagaccagcctggccaacatggtgaaaccctttctctactaaaaacacaaaaattagctgggtgtggtggcgcatgcctgtaatcccggctacttgggggctgaggcaggagaatcacttgaacccaggagacagaggttgcagtcagccaagatctcaccactgcactctagcctgggtgacagagtaagactccgcctcaaaaaaaaataaaaataaataaataaataaataaataaaagccaatgttgggaaagacacagaaaactgaggaattgtgcggacttaagagacagcagcattcaaatgcaaagtgtgatcctagattggaaccttcgcctaggaaaaaaaatctatatagggcaatattgagacaacagataagattatagaagacattggattaaaatactgtatcaatgttaatttcctgattttgacaacggcaccagtaccatcattatgtaagagaactttctttcttttctttctttttttttttttttttgtttgagacggagtttcgctcttgttgcccaggctggagtgcaatggcaccatctcggctcactgcaacctctgcctcccaggttcaagcgaacctcctgcctcagcctcccgagtagctgggattacaggcatgtgccaccacgcctggctaattttgtatttttagtagagacggggcttctccaagttggtcaggctggtctcgaactcctgacctcaggtgatccgcccgcctcagcttcccaaagtgctgggattacaggcatgagccaccacgcctggcctcagaactttcttgttcttaggaaatatccactgaagaattaaggagtatgtatcatgcctgcaactaactctcaaatagttcaggggaaaaaaatgtatataatgtgtgtgcataaatatattagaaaggtaataaaacaagtagaataaaacgtaaacaattgattgatctagatataatcttgcaatttttccgtaagcttgaaacgacatcaaaacaaaaagcgaccaatttgtccaaagcaaggttaaaagccagagaaataggagacgcagcgctgcattgttaaatgacttgcgcacaaaaatccagtcactctgacacttttttgtttgcctcccttttaaagttcaaattagtttgggtttttcttaattaagaaggtatgtgataaaaaacaaaacagaaaatacagaaaccaccattaaatgattcgatagctccacatatgttaataacattttgttacattctttccaaagcttaaaactttccgaagtttaaaaaaaacttaaaaaaaaaaagtttaaaaacctttccaaagtttaaaaaaaaaatactcaagatttatgattccaaaaattactgctttccagaaatttccaaacggaacagttgcgtcatgggcctgctggtacattgaccacagggccccgcggctctccctataagtgtgagttttataaactccttaaagtaatttattttgtttccattcaaggcctttctctcccacactggccccagaccctgacctcagaggttcgagtccccggagccaaattcctctagttggaatctagtaaatgatttaatggcaaaggggcaggggttgggggcagccaaggaggtgaacttttgacagcttcgtggtcagcagcgacgaccgcaggagcgcgtgtccttgaagcggggaagcgccccttttccttgcctgacaataccgccccacacgcgatgacgcctttggaatagaactgcgcagctctttggagacatacggcgcatatagaggctagaaagggaacagagtaccagagggccttcccgcttcgggagccgcaggcttcttctcttcggagagagagtgagtgagtgagtaagcgagtgagtgagtgagtggggagggagtgagtccgtccacgggggcgggccctctccatgctgcggatctcttaggagatatactgcgcacgcagaggcccggaaggaggcggggtcccaggggtctcctcgctagagcagccccaggattggcaggttccagagtgggagtgggggtgtgtgtgtgtgtgtgtgtgtgtgtgtgtcaggttccagagtgggagtgtgtgtgtttgggtgtgtgtgtgtgtgtgtgtgtcagattccagagtgggagtgtgtgtgtgtttggcaggttccagagtgggagtgtgtgtgtgtgtttggcaggttccagagtgggagtgtgtgtgtgtgtttggcaggttccagagtgggagtgtgtgtgtgtgtgtgattggcaggttccagagtgggagtgtgtgtgtgtgtgtgtgtgtgtccccaggattggtcggttccagagtgggagagagagcgagagagagagagaacgagagagagagagagagaacgagagagagtgtgtgcgcgtgtgtgtctgtgcagccccaggattggtcggttccagagtgagagtgtgtgtgtgtgtgtgtgtgtgtgtgtgtccccatggtgggagtgtgtgtgtgtccccatggtgggagtgtgtgtgtgtccatggtgggcgagcgtgtgtgtgtgtccatgatgggcgtgtgtgtgtgtctgcgtgtgtgcccgtgtctgcgtgtgtgcccatgggggcgagggagggagccctaggcgctcaaggctccgccccctcgagccggaggcctcagcgcagcacaaagcccggggcgcactccgctccggggaatccggccccggcggttgcggcggccgcagcgccgccctcgcgctcagccaatgggcgggcgtgctgcaggggcgctggccccgccccccgggtgcgccgggctccgctccccagactggcgctcgggcagtggccgccgccgggcggtcccggccagaggaaagggcgccctgggagggcccctcgtggctgcagaccccgcaggtcgagtctgccacggatggaactttggaaaaagctagggaaaaggagaaaccgagcttgcaagggctcatcaagcatccaccggggtggcttaggctgcgcgcggcgctgggcgtgtgcccgggaggagatcgggtcaccgcgtggcagctcccgggactgccgaggggccccctgaccccaggcctccctcgggaggggtccagaaaggtgcagcggctcactagggtcacacagcaaaattcctcacattgcagggggggagggtccgcatctccgaactcgccgggccagtgcaccctctattctcacccaccactcacccagaaaacgagaaccatactcataaatacattcttaaaatccacaggctacgtttttggggtaacctccagccagtattccgcatgcatttgaaaacttgtgtgtccccattgaatttgcagttccagtaaaccaaggcagcgagtggacattctcatttaacattcacccccataaatacactttttttggggggggggtctcactctgtcgcctcaggctggagtgcagtggtgtgatcatcgcccactgcagcctcaaactcctgggctcaagccatcctcccacctcagcctcccgagtagctgggactacaggcgtgcatcactatgcctggctaattttttctatttttttgtagacatggggactcgttgcccaggctggtttagaactcctggcctcaagtgatcctcttgcctcagtctaccaaagtgttgggattacaggcatgaatacactttaaagtgtgtaatctgtttgcagcacacacggtccaatccatcaatgaggtcatattaactcaattattcaagcaatcatcaccattagaattggagaaaccgaggcatagaggggctactttgccaataaccagctctgccagaactcgaatccaggtctcccagagagaccaggagagggtgtggtatggagtttgggggagtgggagtttgtttgattttttaaatttgtttgtttgtttgaaacagggtcttactctgtggcccaggctggagtgcaatggagccatcatagctcactgcagtctaggactcctgggctcaagtgatccttccgcttcagcctcccaaggagctaggactacaggagagtgccactgcgacagcttttttttttttttttttttttgagagcgggtctctctatgttgcctaggctggtctcaaactcctggcttcaagcaatcctcccactttggctccccaaagcgctgccatcacaggcgtgaggaacccagcctggctgtaacacggcatcacactgtgagttatgtttacctgttccctacctcgacccacccagatctgacaccctcttggcattggaatgcagaaatgaatggagaccctgtccctgccctcccagtatgcacgagacacatacgccccgtgaagggaaagatgtgtctgtcttgcttattacagcatcccagagccatacacacagtaggtgcataataaatcttgtaggaaaaaaaaaatgcaacggaggggcggggattaggtgactgtccctttatcacagcaggagaggaacagtacatgcaaatgtgtgaatcactcgggctatgttcagagaactataaacagttcagagttgatgaagggcaaagtacaggatgagaggaatagaagattagaccagagaggaaagacagggaaccaaggggcttggactttaccccacagcagaagccaaagaaagatgtcaggcagaaagaacaccatcggattcacatttgggggtcatttttctggcttatggtagatggatgaggaagttgagaggcagaggaaacagaaaagaagaggctggcttctgaagccatcggggaggtggaggtgtcaggacttacctgctggatgacgcccaactttccaccttgggcaactggatacaactcacgagagaaacagcaaaccaaaaagacaggtgctcacatgtggacaatctgggtttgaggtgtggagttcaagatatagaggctgcactttggaggctgaggtgggaggattgctggagcctaggagttcaagaccagcctgggcaacagagcaagaccttatctctttaaaaaaataataaataaaaaattaaaaattagctgggcatgatgatacacaagtgtagttccagctaatggggaggctgaggcaggaggattgcttgagcctaggagttcaagaccagcctgggcaacatagcaagacctcatctctatttcttaaaaaaattaaagattaaaaaaaataaaacttagctgggcatgatgacacatgattgtagttccagctacttgggaagctgaggcagaaggattgctcgagtccaggaagttgaggctgcagtgagctaggatcacgccactgcactccagcctgggtaacagagtgagaccttatctcaaaaaaaaaaaaaaaaaaaaaaggctgaagagccacacttccacacaaaaatggttgtgtttgtggttgccgagtcacagctctaaccactccggcttgctccagaaagctactcatggcaaggtgcaaaaacccctgtttgttgggggcattttggaagtttttattctcattcatgtaggcaatacacattttatgcaattaagtacaggagtaactttttacaagttgttgagtttcaacctattgatgtttcctgcattttgagtccatataaattttacaggctatttagaaattactgataataagagagtacagcttatgagagagaatggcatacccattctctggggcaaattcagagcctcaatttctggtaaagagaaacaattaagctaaataaaagtaacacttgaatcagtaaatgaagttatttttaatatttccaaaattgttagtagagctgtctttacaattttttatggatttaaatgacatctgtttttaatcccagcactttgggaggccgaggcgggtgtatcacctgaagtcaggagttcaagaccagcctggccaacagggtgaaatcacttctctactaaaaatacaaaaattagctgggtgtggtggtgggcgcctgtaatcccagctactcgggaggctgaggcaggagaatcgcttgaaccctggaggcagaggttacagtgagctgagattgtaccactgcactccagcctgggcgaccaagtgagactctgtctcaatcaatcaatcaataataaataaattacatctattttcattctttttttttttttgagttggagtctcactctgtcgcccaggctggagtgcagtggcgcgatctcggctcacggcaagctccccctcccgggttcacgccattcccctgcctcagcctcccaagtagctgggactacaggcgcggccaccacgcctagctaattttttgtatttttagtagagacggggtttcaccgtgttaaccaggatggtttcgatctcctgacctcgtgatccacccgcctcggcctcccaaagtgttgggattacaggcgtgagccaccgcgctaggccttcattcttaattttatctacaatatttgttctctccccctcctttgtcttagtttttctgttttattgattcctccctctaaaacagcactgtccaacaaacgttcagcagctatggaaaagttctgtatctgttctatccatttcagtagtcactaaccatacatggcccctaagcagtggaaacttggctcgtgcgactgagaaaatgaatttttaatttaattttcacgtgggttgtggccaccctactgagcagcatctctctaaaagatccagctttttgattttgtcagttctatttgttttctaatcagttcgtctgtgcttattatttccaatattcatcatctcatttttgtgatttctctctatattcatataataaattatcaagcaaatttcctctataatcatttaaacctctgcctttgtctccatgttcacatcattgtcatcttcaaatagtctatccttgcagtgtttcgatcctccaacttaagacttaggggttggttgtttttttgttttgttttgtgttttttgtttttttgagatggaggttagctcttgttgcccaggctagaagagtccaatggcaccatctcggctcactgcaacctctgcccccggggttcaagcggttctcctgcctcagcctcccaagtagctaggattacagggtatgcgccaccaccctcagctaatttttgtacttttagtagagacggggtttcaccatgttggccaggctggtctcgaactcctgacctcaggtgatccgctcgcctcggcctcccaaagtgctgggattacaggcgtgagccatggtgcccagcccttttcggtttttttgtttttgtttttttggttttcattttctttttaattatcaagtggtaggagtctctcttacatgcttgttcagttaagcttttaaaaattaattccagttatgcttacttgcagccagagattagaacccgtacaatgtctgcttttttggaatgtattggtttggggtggggttttgttgttttttttttttttttttcagatttaacagatgattgatttttctaactattccaagagcactttaaaatgtatattgtttgcagagtgcaaagttcagtcctatctgttaccacaatcttattaaccatgttattcaaactttttgttacctgagtctcatctcccagatccaggctgtgttggagtcttctccgaagtttctccttgcatttccaacaatttgctctctacagtttaattctattctaggtgaccctcaactcattaaagatcatcccttcaaaccatgcaaaagctctccctctctccctgaaaacgcctcgcgccttgaattctttgcttatttttctctgttcaaatttagccacacgttgaagttttctgtgtcatttttggaaataggtatgacaatctgtaagcggcacagagagagagaaccgcagcctccatgggaacgaggaagtgggaacgggatgagagtttggaatcgatctccgtggaaggtctgaattgcaaggcgggtttccctggggacaatctcaaccataaaaaagttctgctcacatgactgatggcttttcaataacaagtatatggcggtcttgaatgtgcacaggttgacagttttcccgggagcttctacatgcacgagctggcagagtctagggacagggacaaggaatggagaaaatttcctcaactcctgaaggacacaggtgcccatggggacgtactgaatttctgcagaggcaccgtgaaacagaatcataagtcagaaggaaaatgcacctatttcacattccatcgtgacaaaagggagacgacttttagcttacctcctgattctgcgggttcctaaaagccaggatgactgctttaacttttatattttattttatttcagatggagtttcactcttgtcacccaggctggagtgcagtggtgtgatcttggctcactgcaatctctgcctcccaggttcaaggaattctcctgcctcagcctcctgagtagctgggattacaggctcccggctcactgcaatctctgcctcccgggttcaagcaattctcctgcctcagcctcctgagtagctgggattacaggctcccggctcactgcaatctctgcctcccgggttcaagcaattctcctgcctcagcctcctgagtagctgggattacaggtgcccagcaccatgcccaactaatttttttttttaattttttatttttagtagagttggggtttcaccatgttggccaggctggtctcgaactcctgacctcaggtgatccacctgcctcggcctcccaaagtgctgggattacagacgtgagccaccatgcccagcctggaatgactgctttattttcccctctataagttacgagagtcttcgtgtgtcatctccatgccaggagcctcatggcctcgttttcccggggggccactccccgtgtatatacctcagacactgctattctattagaaaaacatgtgaagttctctgattgggggaaagatccatttcctgctcatgttgatttcaacaaaagaaaggaataagtttccctctggatcctcagacttcactggctaatcaagacccaccttgcagctgctctttgtccaccagagcaaacagcccagatacctggaacttcccagttctacctggatttatgctactgagccctggcacctatgcggggaaaatgcaataaggaaaaaaaggacaaacaatgctcccctatcaggctggctgctgaacatcatcatgtaagaaagatgggtagagccgggcgcagtggctcacgcctgtaatcccagcactttgggaggccgaggcgggcagagcacttgaggtcaggaactcgagaccagcctggccaacatggcaaaacctcatttctactaaatatacaaaaaaaattagccgggcatggtggcgggtgcctgtcatcccagctgcttgggaggctgaggcaggagaatcgcttgaagccaggaggcagaggttgcggtgagccgagaaggcaccactgcactccagcttgggcaacaaaagtgaaacttcatctcaaaaaaagtttactaggcagcaaaacacctcctgttgcttgtcccattctctagtggcttctatcaacagatctgagctcctacggagtgtccggcaccatctgagctccagatacaagctaatggttagaacagacctttccacagcctagagggtagacagagagaaatctttagcactgggcatgcaagcacatttcgttacaaattgtgaccatgctccaatcaagttcacagggggctgaaacgcccgggttgttaatttcctcagaaggttattctataaaagccaaagtgttactttcttgcattgagaaaccagagcaccaaatgccaactttctagctcagttctcaccttccttcctcatgtctgccatgcaatcaaactaaggaacggatggacagccagccatgcctgtcagtcccgcagtagccaggcctaagatggggacagtaggaggagcgtggagaaattctacattgtccaaatctgctctcttggcttcctgcagtggctctctcatgcctgtaatcccgatactttgggaggctgaagctggaggatcacctgaggtcaggagttcaagaccagcctgggcaacatggcaagacccctcacaccccccacgcccatctctacagataatacaaaaattaggtgggcattgtggtgcacacctgtagtcccagctattcgggaggctgaggtgggaggatcaattagcccaggaggtcaaagctgcagtgggttatgactgcatgacagcactccagcctgggtgacagagtgagacactgtctgaggctctcccatcagacctgcgagccacagcttcaatagccagcacgtggagtgcaaggacttatggtatcaggtcgacctgagtttcgagcagacacagctacttcctggtcacatgagtctgctttctgtgcctcggtttccccatgtgcagacgggaaccatcgaagtaccttgggctgacttgaatactggaggggatgacgcacaaaatagcactcacaacttcctttatttcatgggaagagagggttggatggattaaaccaggggtcccccacccctcagggagttgagagacagaatctcattctgtaacccaggctggagtgcagtgggtgtgatcatagctcactgcagcttctacctcttgggctcactcaatcttcccacctcagcctcccaagtagctgggactacaggcacacacttgtgatccacactcagctaattttggtattttttgagcagacggggtttggccatgttgcccagtctagtttcaaaccagccagttaggaaccaggctgcacagcagtggacgaggggcgggcgagcgatggaagcttcatctgtatttacagtcactcctcattgcttgcatgaccatctgagctgcgcctcctgtcagatcagcagcagcattagattctcctaggagcgtgaaccctattgtgaactgtgcatgcgagggatctgggttgcacgctctttatgagaatctaatgcttgatgatctgtcactgtctcccgtcaccaccaaatgggactgtctatttgcaagaacccaggaggaggaggtttcagtgaacagagattgcaccagtgcagtccagcctgggtggcagagtgagaccctgtctcaacaacaacgaccacaacaaaaacaaacaaaaaaagagtcatcaaggaataaataaaacgggtgacacgctgtttttctaaagcccaaatatcacgttgtcaaccacacttcctgatgacatctaaatcccctttgaaactgcttggaagtttctagaagagctcatccacagtaacagaacactcaagtctaaaagggaaaacacaaaatccccaattttcctctcagaaatcaagatttaatagcctcctaaggaaaccataatttgagggccattgggagcattactctctgaggcctgtgattatagaatgccgagaatgattgggaacttgaaccaccagtgaatttgggctccaactaaaatgaatgagacccgtggccaggcacggtggttcacgcctgtaaccccagcactttgggaggctgaggcaagcagatcacctgaggtcgggagttcgagaccagcctggccaacatggtgaaaccttgtctctgctaaaaatagaaaaattagccaggcatggtggcatgcacctgtaatccccagctgctcgggaggctgaggcaggagaatcgcttgaacccgggaggcagaggttgcagtgagccaagatggtgccactgcactccagcctgggcaacagagtgagactccatctcaaaacaaaacaaaacaaaacaaaataaaaaattaaaatgaatgagacccaaagcagaaggtataccaaagccccctcacccacacacagacactaagaggaggctggggagggctcaaggaagttggaaagagggaaaatatcacgagaataaagcaaccatctcaaaaaacaacatgagtttccccacttatgtctccctagcctggctaaagaaaggagaatgggccgggccagtggctcacacctgtaatcccagcactttgggaggctgaggcaggaggatcgcttaagaccagaagttcgagacaagcctgggcaatatagcaagacccatctctacaaacaagtttaaaaactacttgagggcctgaggcaggaggatcacttgagcacaggggtttgaggctgcaatgagctatgactgtgccgttgcactctagcctgggtgatagagtgagaccttgtttgagaaggaaggaaggaaaggaaggaaggaaggaaggaaggaaggaaggaaggaagggaaggagggagggagggagggagggaggcaaagaaagaaaagagttacaaggagcttggccttgggcatggaaagggatttgtggttaagagctggcccctcttccagcccttgtaccccccagaaaaccacctcgtgtttggctcacgaacttctgcttcttggaactcatctaagtcaaagacaacaacaccctctgagatgctactgacctcatgccacgtaactattctgtggctgccaggaggaaccgcccactcgctcttcttgggtttactcctaattccacgcccacctcaccttgaacttcccactttgaaatctaaagatcaaaggtgtttcttggttctcacatagaaatcccccccttgaacttccttcctatctgtttcctcagcctatcttccctctggccgtgtattattcacaaagagttctacaggatacaaagataaaatttaatgtactttccttagcaaccggaaaaaaaaaatccctgaaaaattaaacagcagatacccaaatagaaactttgctttagaaaaatgggatttgaccacacacacgtgcacaggccacacaaaccgtcataaccttgaccagcttaagagaacaattctcaagccagtgagaaaacaacagctgtggccgggcgcagtggctcacacctgtaatcccagcactttgggaggcccaggcgggtggatcgcttgagcccaggagctcgagaccagcttagataacatggcaaaaccctgtctcggctaggggtacaaaaattaggctgggcgcagtggctcacgcctgtaatcccagcactttgggaggccgaagtgggcggatcacgaggtcaggaaatcgagaccatcctggccaacatgcgaaaccccctctctactaaaaatacaaaaattagctgggcatggtggcgcgtgcctgtaatcccagctactcgagaggcagaagcaggagaatcgcttgaacaggggagttggaagttgcagtgagccaagatggcgccactgcattccagcctggcaacagagcaagactccattaaaaaaaaaaattagctgggcatagtggcacatgcctgtgatcccagctactcaggaggctgaggcatgggaactgcttgaacccaggaggcagaggttgcagtgagccaagattgtgccactgcattccagcctgggcgacagagcaagattccatctctaaataaataaataaaattagctgggcatagtggcacacacctgtggtcccagctactcaggaagctgaagcaggaggattgcttgtgcccagaaggtcaaggctgcagtgagctgtgatcacaccactgcactccaggctgggtgaccaatgcatcgctctcacctctctccaggcagcctgcagaagccagatatttatttgaaacctccagcttctgctcctcatgtgtatgcaaacgttgagctcaactccataaaagtcatgttttgttttgttttttgttttgagacagggtctttctctgtcacccaggctgcctatcacagctctctgcagcctcgacttcccaggcttaactgatcctcctgcctcagcctctcgagtaactgggattataggcacacaccaccatgcccagctaattttttttttttagagaaggggtcttgctatgctgcccaggctggtctcgaactcctggattcaagcgatcctcccgtctcagcctcccaaagtgctgggattacaggtgtgagccatgacgcctggccaaagtcatgtattttattccataatagatgtacatgagggtaaaaataacacttgactaatgtacaggttgaaatacagaacatttgcaccacccccatctttgaatactatttcatccaccctactccaattccaagagcaatgtcgtgggtgtcttagcaatcaaggatagcacctccagaacaaaaacgctgtgaaagtcaaagagaagttctgtttatactaacaaagggctggaaatgtctattggttgtgggttgaataagtaaattccaaatgaacgtgaccacagaagaaacagagattcaaaatgacccccaagaagtattactaagggagaacgccaagagccaggcgcagtggctcacacccgtaatctcagcactttaggaggccgaggcgggtggatcacctgaggtcaggagtttgagaccagcctgatcaacatgggaaaaccccatctctactaaaaatacaaaaattagtcaggtgtggtggtgtgtgactgtaatcccagttgctcgggaagctgaggcaggagaatcgcttgaacccaggaggtggaggttgcagtgagccgagattgagccattgcactgcagcctggtcaacagagactctgtctcaaaaaaaaaaaaaaaaaagtaaacaagagtgtctcctctccataaacaaattaacaggagaaactcagccccactaaaacacacacaaatttaggaaattgacaaaaacctaagagctgagaaaatatgggttctggagtctcagtgtttggcatcaagtcatggctccactttctcctcgctgtgcgactcctggaggggaacctagtgtgcctggtcctcagtttccctgtctgtagaatgggctgggaaaaactatgcagattcttggaaccagggtgacacaagcaaggcactggcctctggcataaaagttaaggcgtgccaaaaccgtcttcaagataagttatatatataaatatatatgtatatatggagagagagagacagagacagagagacagagagagacagagtcttactctgtggcccaggctggagtgcagtggtacagtctcagctcactgcagcctctgcctcgcggtttcaagcaattctcctgcctctgcctcccaagtagctgggattacagccacccaccaccatgcccagctaattattatatttttagtagagacagggtttcaccatgttggcgaggctggtctctaactcctgacctcaagtgatccgtcctcccaaagtactgggattacaggtgttgatcaaactgttcttgatacaatcaggtaattccagaaaaattgtccccttggggcctgcttgttagttggctggtttgtttgaaagaggatctcgctcagctgcatgggctggagtgcagtagcaagtcacagctcactgcagcctcgacttcctgggcttaagcgattctcccacctcagcctcccatgtagctgcgactacaggtgcatgtcaccatgcccagctaatttttatatttgtagtagaaataggctctttctgtattgcccaggctggttttgaactcctggcctcgagaattcctcccaccttggcctctctaagcaccaagatgacaggtgcgagggaggcactgcgctgtcttatttagcaataagctacattccattttcaggaggtgacgctgtcatcccactgccagtacaatccaggtaaggatttcactccatcctctgtgttttccaaaggagccggtatttgaaaaggacgtgcattccaccaagcattcttaacgacctgggcctttggggtcaggtaagttccagattttattattagtaacaaattaaattgactaacaacaaaagaaaagtgcaccatcaatgacccctcaggaaccaaaacatgcacaatcccattgacacagggacagagtaaactgctcaacagctgactctactcccacagactgaaagctgcagggtcagggccggcagccgcggagaaggaagctgtccccgtcaacacggtctggaacaatccacaacgcttatcaggggagataccacaggcaagagggaacgaaaacacttcttctgccaaatagagctttggagggaatatcggtttgtctggggcaggactgggtcacgggctacacgccttctccttgtattctcacgaattcaacacctggtaatgccggggccgtttcccaagtcacagactcagactctggggtggataattcccccatcactgttatcttaaagtagggtttctcagcctcaggactggtggtattcagagtcggatcttcatctggggaggggccgtcttgtacattgcagggtgctgagcagtatccctggcctccacccactccatgtcaggagcatctccccccaccccgacgtgtgacaaccacagatgtccccagaaatatccagacccaccctagggtgagaaccacttggtgagcgagactcttgccagagccagagggaaatcatcaaagccgatggggctgaaatggttaagttggtccatctgtctgtctgttcatcaggccctgatttatagctttgggggctccagcaccccattcccctggcttccccacagtcacactgccattccccatcatccccgggacccaagccctgcgattcccgctcagctcccacctagcagacacatgttgaatcgaatgcccattcatctgtccaagatttgctgagggtctgccatgttttggaggcgcttcaatagcgacaagacatcgtggaccttgacctcatggtgcttccagtctagcaggcaggcaggcagaatcagagagaaaatttttctttaaatttatttttgggtttttttgagatggagtttcactcttgttgcccaggctggagtgcaatggcatgatctcggctcactgcaagctctacctcccgggttcaagcgattctcctgcctcagcctcccaagtagttgggactacaggcacccacccccacgtcctgctaattttttgtatttttagtaaagacggggcttcaccatgttggccaggctggtctcgaactcctgacctcaggtgatccaccaacctcagcctcccaaagtgctgggattacaggtgtgagctactgtgtccagccagagagaaagttccatctgcttctgtaccaccctctagcagccctctccagccccgccccctcagtgaattcctacagcacacaaggatcccaggccagcaattagagtcctttttcagctctgtttaaaatgtgaggcttagaataacagtgaagatgctttaaaccactacagggggccgggcgcggtggctcacgcctgtaatcccagcactttgggaggccgaagtgggcggatcacgaggtcaggagatcgagaccatcctggctaacacggtgaaaccctgtctctactaaaaatacaaaaattagctgggcgtggtggagcacgtctgtagtcccagctacttggcaggctgaggcaggagaatcgcttgaacccgggaggcggaggttgcagtgagccaagatcgcaccattgcactccagcctgggctacagagcgactccatctcaaaaaaaaaaaaaaaaaacaaacaaaaaaccctacagggcactgcaggaacccaccctccataaagtatgcaaagaattattatgcagcattcacttcccctttgcttctctcccccaaggaatgctcaagataaattctctcttgcaggtcctttatttatcaagccaaacagcatctcagagggataatttatgcaacaaaggttgcaaatcatttgcacatcttcaaagtattattgtccatagcccagtgcatgagcgcctctaattgtctacaaagaaaagcaacaccttcaacaactcacgtccagcagagaaagacttcagacaggaaaagtcaaatcacaagttaaaaagtcagaactggctgggcacagtggctcacgcctgtcatcccagccctttgggaggctgaggctggtgagtcacgaagtcaggagttcgagaccagcctgaccaacatggtgaaaccccatctctagtaaagatacaaaaaattagccaggcgtggtggtgcacgcctgcaatctcagctacgcgggagggctgaggcaggagaatcgcttgaacccgggaggcagaggtttcagtgagcagagattgtgccattgcactccaggctaggtgacagggcaagactttgtctcaaaaaaaaaaaggaaatgggatacagacactttaacttcccaaaacccagacaggttggctgttagcaacctgggcgagaagtctatgaaccagcttcacaataaatgccttttaaggatggctatgtgatgaaggtgttttctctttgtgattaaacgccttactcatctgaagggggaaattccatttaagaagtgaaccaggtatgagaagagacattttccccagagggaggcaatgacctctttcctccctggggctcggaacttgtttcttcacacgtcctcccagaactctagttcttattcccccctgtgctggccctccataaacatttgctgaacaaataaacccatgatggaaggcaagagaaacttcaagacaagacggctaggccgccgactgcctaactggagggaaccagatgttagcattaaagttaaaagttaaaagccttcccaaggtcaccaagcgaggtctctctaacctggcctgaggtcctcattcttctctaccctgtttacccaggatggaaaaatgacattctctgctggtgggctggttgtccacgtgagagatttcaacacagcgtttggaggttttaaacctctatcatcgctgcagcccaaggaacaaaatcaggggccaggtatgcattaggggatttgcaaatgctgtcttatttcatccactcaatgaccatagaggaagatatgatgatgacttatccctctttttatagatgaggaaacagagatgttcagtagttccaaagttccttcccttccctttttttcttccctccctccctcctccctcccctccctccctttccttccttccctccctccttccttccttcttccctccgtccccacctccttccttccttccttgttccctcccttttttttccttccttccttcccctctccctccctcctttcttccttccttcttccctgtcttcccagcttctttctttcttcagggtctgcttctgttgcccaggctggagtgcagtggtgcaatcatagctcactacagcctcgacccctgggctcaatggatcttcctgcctcagcctcccgagtagctggggctacaggcacacgccactgtgcctggctaaatttttattttttgtagacaaaggtcatacagcaaagaagtggaagaactaggattcgaacccaggaccatgggctctgagtctgtgcttgttcatggaagcaccagccagttcagacactcccaggccttgcccagatggtcaaatgcttcaaacaaggacaccagggaaggtcactgttcctcgtatttatgccccttgtgtcactgtctatatctggggttaagaatcactccaaaaacaccacaatgatctcccagactctcaattccagcagagcagacagccgtccccaccaccaccccctccacccactcagtcctctctcggttccacttcaggatgactcgaaagacagaaaaagactcaaagcaaaatgcctaaagcttggaaacgccagcagcccctgaaaactaccgagcttccttttcctgtatttatttatttatttatttatttttttgagatggagtcttgctctgtcacccaggctggagtgcagtggcatgatcttggctcactgcaaccttcgcctcccgggttcaagtgattctcctgcctcagtctcccgagtagcttgaattacaggcgcatgccaccacgcctggctaatttttgtaatttttagtagagacagggttttaccatgttggcctggctggtctcaaactcctgacctcaggtgatccactcaccttggcctcccaaagtgctgggattacaggcgtgagccaccacacccaaccctgagtctccttttctgataacatccttcatttctgcttccttctgcttccttctctgaacatattcgaatcacaaagccccagctctgttgggaaattccgacgggaattgaaacaggttcctaatctcatggtctcacctgagggaaaagtggctaagaagatggaagcaggctgggcacggtggctcacgcctataatcccagcactttgggaggccaaggtgagtggaccacctgaggtcaggagttctagatcagcctgaccaacatggtgaaaccccgtctctactaaaagtacaaaaaattagccaggtgtggtggcgtgcacctgtaatcccagctacttgggaggctgagtcaagagaattgcttaaacccaggaggcagaggttgcagtgagctgagatcgtgccattgcactccagcctgggcaagagagcaagactctgtctcaaagacaaaaagaagatggatgtaactgactgtgcctctgaaatcctaaacagaatattacatggcgtcttggacctccgtgatgttatgcggtacaaatgagacggcccctgaactcccactgtgtaccaggagttggggagaggtgcatagtagcaggacagacatccagagggtaacagggaaccacgggggatgtccccgggctctgggttcgaaaatgcaggccccttgtatccagggggtctgggaaggaacaaattgccacggtgtaatggagccactgcaggtgtccccagaagccacagcaaggccatcaggatgctggggccccgtatccacctctcaccaaggccctgctctgactcctgttggcccctggctagagacccgcccagagggggtttccaggcccaggtgctgggtttctcaccgtatccatttcccattgctgctgtcacaaacgcccacaaatgtaaaacgacatacatttattattttctcctgcatcgggatcttactctgttgcctaggctggagtgcaatggtgcaatcatggctcactgcagcctcgaactcctgggctcaagcaatcctcccacctcaacctcccaagtagctgggaatatagatgtgtgccaccaagcccagctaatttttcttcttcttcttcttcttttttttttttttgtagagatggggtcttgctatgttgcccacactggtctcaaactcctagcctcaagaaatcgtcccaccttggcctcccaaagtactggcattacaggcatgaaccatcatggcctgcctattttcttacagttttggtggtgaaaagcccaaaatgagtcttacagggctaaaatcaagatgttacaaaggttggttccttctggaggctccagagagaatccagcttttaaggcagctcctttttcttggccgtagcatttcaatctcttgcctccctctttccttgaaaaggatccctgcgatggcatttggtgcaccagataatctaggatcatccccccgtctcaagatcctcaacttaatcacatctgcaaagagccttgtgccaagtgaggtaccaaattcacaggtgacagggattacgatgtgggcatctctgggggaagggagaggcatcattcaaccgaccacattcaccctttctggtattttcctctcccagccacagaatgtttcggtagcagtcatcgagtgatatcttttttctttttttcttttttgagacggagtctcgctctgtctgccaggctggagtgcagtgggcacgatcttggctcaccgcaagctccgcctcccaggttcatgccattctcctgcctcagcctcccaagtaggtgggactacaggagcccgccaccacacctggctaattttttgtatttttagtagagacggggtttcaccgtgttagccaggatggtctcgatctcctgacctcgtgatccacccgccttggcctcccaaagtgctgggattacaggcgtaagccaccgcacccggccttcttttttttcttttgtaaaaacaaaacagaaaagatgcaagggtgacacagaaagttctcatgtacccatcactcagtaaagagataaattccccaggaatggaacagaatgtggcacccaagaatctgctgctcaggagagtccccagagctgtctccactgtgggaggatgggatggtgacggagatagaagagtccctgccttgtggcgggggaagagagattgcaaaacggtgagcaaagaaataaacacgttccacctccataggaaaacacagggggaaggggagaaattctgaccccccgggggtcacgtggaagtgtcttggagacatttctggttgttgcaaccagtgtggggtgggagtgctactggtatctagtggggggaggccagggatgctagtaaacaccctaaaatgcccaggacagctgccaccagagagataatccagctccaaatgtcctcagtactgtggttgaataggcagggagtgaggaaatttcatctaagagaaatcaaatcagttgcctaatgtcaccctgctcaaaaggggcagacctggggttaacaaccatgggtttttctcagagattctgcacactgaacttcttgcctcttgttttttgttttgttggttttttctgtttgtttgttttgttgtttttttctgtttgtttgtttctttgtttttatgaaacgaagtctcgctctgttgcccaggctggagtgcagtggcatgatctcggctcactgcaacctctgcctcctgggtttaagtgattctcctgcctcagccacccaagtccctgggatcagaggcacccgctgccacatctggttaattttttgtatattttttgtacagatggggtttcgccatgttggccaggctggtctccaactcctgaccccaggtgatccacctgccttggcctcccaaagtgctgagattacaggtgtgagattaaggcccagcccttgcctgttgtttgagcaaagataatctgaggaaatcgtatgaggaagtatcacagggaaaagcatgtaggtagagggaacagcaagtgccgaggcttacaggtggcaggaaggcagccagtgagctccagccaagggtcccatgtcagagaagtaggtaactgacttgttggtggcagcaaagaagaaggcatgaaccattcgctcttctgtgcagcagtcactctgtgtgtggttttcagacatatttaaagtggatttaaaaaacaaacaaacaaaaaggacttgcaatccaacatctgagtaggggctttattaggcttcccaggacctggggaaattacccaggattcaggataaaactgcaggggtgtctgttgcagggaccagatatattactctctcctgaccacaacctttccaacctccacactggcctctgaagctccgggctccagttactttcactgaccacccccggggctggaagccatggaggggagctctgcagctctttgggcttcacatgttgctctgattgtcatgccttggattagcaagacctctttcagtttgtgagaatagaaagctcagttatacagagagaaagaagagagagagagagagaaaagggagggagggaaggaaggaaggagggagggagggaacgaaggaaagaaggaaggaaggaagggagggagggagggaagggggagagagaaggaaggaaggaagggagggaagagagagagaaggaaggaagggagggagggaaggagggagggaaaggaaaagaaaggaaaggaaggagggaaggagggaaggaagggaaagaaagaaaatgaaaaaaaagaaaagaacgattgctggctcatttaactaacaagtcataggacaaggacactttcaggtacagctagatccaggtgtcaaatgatgtcatggggaccccatctctctccctttccttttcgcagtcctgcttccttctatggtgtcagaagtctgagacacgtggtctctacatggtggcacctggattatagcttcacagcaaggaagatttagcaaggaaaaatctctctatcactcccactaaagtcccagaactgaatcttatggaaccttctggggtcacatgcccacccctgaaccaatcatggaggctggaggaattaagaaagctgattggcccagtctgagtcatgtgccttcccctgagccaatcataagagtctgaaggaataaaggaagctggctctgggaatagagtccacacaatgaggtctgagtggcttcccaagcaaaatatgattctaacccatgcaaaatctggttctatctccaggaatgctgagtaggcaaatctgaatgcctcctctccagagatgagtaatcttgtgtttgcctccttttcaagttggtggcaaaagtgaatcctatttttttgttttattttatttttgagatggagtctcgctctgtcgcccagcctggagtgcagtggtgcgatcttggctcactgcaacctccgcctcccgggttcaaacgagtctcctgcctcagtttcccgaggagctggggctacaggcgcgccaccacgcctggctaatttttgtattttaagtagagacggggtttcgccatgttggccaggctggtctcgaactcctgacctcaggtgatcctcccgccttggcctcctaaagtgctggaattacaagtgtgagccactgtgcccggccacggatcctatttttacaacttgtgccaactctaggtaggttcggtcttgttatgcccattcgaaaaactgggactaacagagcatatgttatgcagtgaccaagaaaattaaataaaataatagatataaaacacttagcacagggtctagtatttggtaagtctgccacacatcggcaattattattcctatattttaaattttactggtaacataatagtatgatttgaatatttgtcccctccaaaactcatgttgaaatgtaattcctcatgtggcagcattgagaggtggggcctttcagaggtgattaaaagggctgtgtcctcataagtggattaatccattcatggattaatggtttatcataggagtgggactggtggttttataagaagaggaagagagacctgagctgacactctcagctccctcgccatgtgatgccctgctccctgtcaggactctgcagagtccccaccggcaagaaggtcttcaccaggccgagcgcagtggctcacgcctgtaatcccagcactttgggaggctgaggcgggcggatcacttgaggtgaggagtttgagactaacctggccaacgtggcgagaccccgtttctaccaaaaacacaaaaattaaccggctgtggtgttgcgcacctgtaatcccagctactcgggaggctgaagtgggagaatctcttgaacccaggaggcagaggttgcagtgagctgagattgtgccactgcactcgagcctgggcaatagagtgagactctgtcaaaaaaaaggaggaggaggaggaggaggaggaggaaagaagaagaagaagaagaaggctgggcgcagtggccacgcctgtaatcccagcactttgggaggccgaggcgggcggatcacctgaggtcaggagttcgagaccagcctggccagcacggcgaaaccccgtccctactaaaaacacaaaaatgagccggttgtggtggcacacgtctgtaatcccagctacttgggacgctgaggcaggagaatcgcttgaacctgagaggcggaggttgcagtgagccgagatcacaccactgcactccagcctgggctacagagtgagattccatctcagaaaaaaaaaaaaagagatccctcctttcaggataaagtttgcatggactctggcatcacactgggtttcaacttttcctttctagctatgtccccttctctaggcaattcagctactccaggccccccgtccacttaccaggacacaggaatcagagtaacacccatctggcagggctgttgtcgggatcaagtacaattatacagcaggcttggggttctgaagcagctgggaagatccacaagccacgatatattgagcaccaactgtttacagctatcaagcatgtactatccaccaggcacatgatcctcctagcaattttttcatttttctgcacagcaccatttgggaaaggctaagtcagagtctggggtgggttgaaagctagaagacactctgagcctatgtcctcggtaaaaaaaaaaaaaaaaaaaatcaggagtgacccatgctcagctgatagcattaacggggaaggaaagagggcgacagagactcttccccaacatctatctagcccagcttggcactttggaccgcagcctgtatggaaattcctggcctctgatgacctcaagctgtcttggtctttaatcctgactctgaacctgtttccttactcagatagaggtctgacttttgacatgtgtcccgtacacccagcacccatctggcttccttatttttttgtttttttaagagacagggtcttgctctgttgtcctggctggtgttcagtggtgtgaccgtagctcactgcagcatcaaactcctgcggtcaagcaatcctcctgcttcagcctctggagtagctgggactacagccatgggccaccacagctggctaatttttttatttgtttagagacagggtcttgctacattgcccaggttggtcttgaatccctggcctcaagtgatcctcccacctcggcctcccaaagtgctgggattacaggcatgagccacggtgtccagcctggcttccctatttggcagtgattatgtccactccttgctcttggtggaggaaacagctgtgtccttggggagggccaggctgtaggtaactacgcttccttagaggaagctataggtataaggaagtttgcttactccagggacagggaggccagctcccttgcaaaaaaggcaaagagggaggccagtgaaaaactggctaaaactgtctgggcactgtggctcatgcctgtaatgccagcactttgggagactaaggagggcggatcacctgaggtcaggagtttgagaccagcctggccagcatggcaaaacaccatctctactaacaatacaaaaattagcccagtgtggtggcgtgcacctgtaatcccagctactcgggaggctgaggcaggagaattgcttgaacctgggaggcagaggttgcagtgagctgagactgcgccactgcactccagcgtgggtgacagagtgagactctgtctcaaagacaaacaaacaaaaaaaaccaactggctaaaactaaagaggttaccatgtgccactcactacactttacatgtcacaagcattaattacctcatttgattttcacccaaaccaagaaatggaagtatctagagaaagaagcccagcataaagacacaagggagcatttttggaggtaaccattgacagaaatgagttaaagaaaattcaactggtgtccaggctctggtgtaaaattctgctttggggtgaaacgcagggttacctgggcacactgtgatggtcctggctaaccagtagcaggtgggcttttgcagagataatccagggccctgtgatgagttggtcaccctagtgacccaattttggcctccagatattggcttctggccaattctaggaggatcaggaagccaaatttagcacagaatgtgctgcttcttcattgaactcctattcacccttcaaaacccagtacaaaagttcccttcctctgtaaggcagagtatagcaagaaaagctagggttctgaagccagagagactgtgggttcaaatcctagctctgtgaaaagattgttgtgaggaccatgtgcctgggagacaatacatgctcaataactctatacagctggtgctcagtagtgacttatggatattcccaggtgcttcaaagccctcaacctgatggatattactctattaaacccaaaatttcccatcttccctcctctaagccaccagaatagactggaacaaaaaaaaattttttttttttttgagaccagtctcgctctgccacccaggctggagtgcagtggcatgatctcggctcactgcaacctctccctcttgggttcaagccgttctcccacctcagcctccagtagctgggactacaggcgtacaccaccacacccagctaatttttgtatttttagtagagacggggtttcaccacgttggccaggatggtctcgatctcttgacctcgtgatccgcctgcctcagcctcccaaagtgctgggattacaggagtgagctaccacaccaggccaatttttttttttttttttttaaagacaaagtcttgtgacatgctcaaaccagctcatgcaaatctccgtttcagtctttctccctcaacctcaagccctgacaccaagcagggctgttttccaattggcttttcctctgccaagaatttccccagagcacaaacagaggcgtgcagcgaagtaaacacgggaagctctgaaaacccattcatgggcaactcaaaggtgtcgagacatcagggtgtgtggccgagctttccgccatgggggcagcgagcctccacgaagcccaggcgacttgccgacggccccactccaggtgaccaagccacatctcgaccagaggaaggagaacatacaaagaaagacactgtctctgccggagggcgatggtccaggcagtgcaccctgggcgaaggggccaagaagccgtaagatgtgcgtcccgaggaaatgcaccgtggttataaatacagcaaagagtgtttggatgaagctggtgtctgaaagtggagacagtcctggctaaccaatagcaggtgggcttttgcagagataatccagggcccttttcacagagacctagggctgtaaggaagtcccccaaacgcccaataaatatccaggttcttgtctctaaattagctggctgaagaaaacttggtccaaactgcatcagaggtgggggtgggggaacagaggaaagaaaaggggatgagagagagacagacagacagacagacagacagagacagagaggggagtatcccattaaggcagcagggcagcagcaaagaggagagaggaggggagaggggaggttgtggccacatgctgtgtaacacttagagtttcctatgcacccagcactattccaattattaaccatttatttcccccaacaatcctagatgttcccattttacagaggagaagactgaggcacagagaggttcagtaacctgcccatggtcacacagctattgagcggccgagccacaagaagacacttgctccatcaatgttactgtgggccagttgccgttataggtgtaagatgattcctcagggagaaacgctaatgttccccttccccgacactttctccagatcagcttaggggtgcttgagtgcctgacccgccacccccgccccaccaccaagccaaaatgcttgagtgacactctctgattctccagtgtaccatgtcaccaattaggtgtttcaagaggggcttccaagagggaaggacctttctgttttcttccctgtggctatgtcctgactccccagcccagcacttgagtaatacataaacccaccttcattaaatgactatcatcatattcctccagattccttggtcccccaagtctagggacgtggtttttgtcggtagcatggcagtgtcaaaccacagagccacgaggctgatgatgggctcttggtttccatttcccccccctcaaaaaaagagcagagaataattgcagagtgcccctcacccccattccagcaccctggtccaggggtcctcaaatggaggcgattctgcccaccaggagacacctggcagtgtctggagacatttgtgtttgccatgcctcgggggcggcgctccaggcatggaatgggtggaagccagggatgctgctagcaccctcagtgcccaggacggccccaccccagagaacaatccagccccagtatccgcaggccccaggtggagaaaccccgtcccggaatgagaagcccctctcctccaccacatcaaagccaagatgacaacgtctctgagtttgacacaaggttagggggaagtctcatttttcaaatggctggctgtaacactaaaaaaggaaaattaaaaatgtctgaggatcggcctagtgtggtgcctcacgcctgtaatcccagcactttgggaggccgaggtgggaggatcacgaggtcaagagatcgagaccatcctggccaacatggtgaaaccacatctctactaaaaatacaaaaaaaaattagctgggcatggtggcgtgtgcctgtagtcccagctactcaggaggctgaggcaggagaatggtttgaacctaggaggtggaggttgcagtgagccaagatcgcaccactgcactccagcctggcaacagagtgagactccgtctcaagggaaaaaaaaaaaaaaaaaaaacaactctaagtaccaactgcagtggctcctgcctgtaatcccagcaatttgggaggccgaggcaggagagttgcttgagcctgagaggtcaagaccatccctggcaacatagtgagaccccatctctacaaaaaatatataaaaattagccaggtgcgatggtgtacacctgtggtcccagctactcgggaagctgaagtgggaggattgcttgagcccaagaggtcaaggctacagtaagccatgatcacgccactgcacaccagcctgggcaacagagccagaccctgtttccaaaaaaaaaaaaaaaatgcctgaaggaggaggtgaatcctagaaacagcccaatttcatctccatatacccctactccaaacaggtttccaaattgcaaaaatggctgataaaaaaaattctttaagctgatgtaaaaactaatgccctcctcctcctgccaattttgctactcttgagcaagatctcagcagctccacttggatgctggaaatatatgccagaggagacttatgatgctaatttcctttagtaaacagttcaaatcttgtcttggacaccaatgaaataagaaaagctagccacaggctgtgtggaattccttcctcttaacactaagcatcaggcattccatgacttttgctcttgggatggcaaacatgaatgtttctagaacactgagttttccagcatataccttttctggttattttcaataggtttggtgtgaaaaattaacgaattcactatttgttgctggacagtccctctggaacaaagaactgtgtgtcaaataccagctgaataatcaagcaaacatttgcattctttttttttttttaaagacagggtctggctctgttgcccaggctggagtgcagtggcgtgatcacagctcaccgcagcctcaacctcctgagctcaagcaatcctctcaactcagcctctcaagtagctgggactacaggcatgcactaccacacctggttaatttttgtattttttgtagagatggggtttcaccaagttgcccaggctggtctcaaacttctggactcaagcgatccgcttgcctcagtctccccaaatgctgcaaatacaggcatgagccactgcacccggtcaacatttgcattctcgtcgaaagatcacgtgctttttccaaagcatgtgagagttttgcatcgactccagccagcttagacctaatgtgggtcctcccctttcaccaagaggacccggctattgcagatgcccttgcaagttacaaaacatgttctccatcaagccacacagggttatggatcggaaaggcagcccaccctgatgaaaaccacagtcgcggtacagattgttttgtttttgtttttgtttttccagaacactgatatgtatcctcaatggttaacattgtgtcctaaaaggtgtttttctgtttcttaacataccagaaacaagatggtctgagaccgcgaccttcacactagggtcatatttcaacacagaaaccagggtagcatcacccagaaaaaaaaaagggaggggaggtaaatcagactgtcccaaatctagggcctctctcagggcacaagaaacagccccagagggcccccatgggtcctgctccctaaggccatttgtccctcttcactgtggtacagggtggttctgaaacgcaccctaactttagtgatgacacagggtccggcaagtatccagacctatagtccagcagactttccatgaagacctgccctaaaatgaatatcgacacttggccagaagcaacaaaataacattccactctgctggaaaattgaggcgggggcttaaaggcttattttaacagcttaacagcttagcaaaataaatctgctgtcattatacacagacaaatgtcgtttatgtctcttgcatctatgagacaatcaagatttcatgatcacaccccatttactcagtgaggctaaagacaggaaggtcaagagtattaacaattatataattatcctctgcagtaaaacaattgaggcattccactcaaatcagaaatgagactgggctgaccatattcagctgcgtcactgaacactgttctggaagttcctgccataacaaggttaacagcaataactggtctaattattggcaaaaggcaagaagtcatcattatctgcagatgctgcaattatagagttggaaaattgaagggaatcaattgcagggcttttagaactagtaagcatttaataaggtagcagtaagtaaagaaaacacaatccctgtcccctatgctacaaaataatcacttttaatacttcaaaacatctcccttatattagatgatagacacacggatagatggagagatgaatggacacatggatgggtggatgaatgggtgggtggagggatggatgaatgaataagtggatgtatgcatgggtggatagatggatgagaagattgctgggtgagtggttggaagggatggagggacaggtgtgtggattgttggcagagtagacagaaggatggatggatggatggatggatggacgtctgggtgggtggatggatggatgaatggatgagtggatgtatggatggatgaatggatgagtggatgtatggatggatgggtgattggatgagtggatggatggatgggtgagtgaatggatgaagggtgactgaatgaatggatgggtgagtggatggatgatggatgaatgggtgagtggatgaatggatggatggatggatggataatagatggtgggtggtgaatggactggatgaatggatagatggatggatggatgggcagatgagcaagtggatggagggatgatggatggatggatggatggatggatggatagatggatggatggatggatggatggatggatggatagatggatgggcagatgagcaagggagtgatagatataaagccagcaatctaagaacaatgcttacaagaagtagacaaactgtgtctgaagcaaaatcacaaaacatttctaagaacaggaaagaacccttgggaaaatggagaggaaatccatgacataggagagtacaagtaaatactgccaaggtgctccttctctccatcaatttatggacttcacatacaatcaaccccataaagggcctctgggtctgtgttttccttttcctttgcttccctttttctttcttggaacttagctacagtttttaaacttttggaagcataaacaaagcaaggatgcttttgaaaaatgaaaaagaagaattactctggaggatacatttacagtctttttttttttttttttttttttgagacagggtcttgctctattgcccaggctggagtgcagtggcacagtcatggctcactgcagcctcgaactcctggagtcaagtgatgctcccacctcagcctcccaagtagctgagaccacaagtcagtgccaccatgctcagctaatttttctttttcttttttttgtttgtttgtttttgtttttgtaaagatggggtcttgctgtgttgtccaggccggcctcaaactcctggcttcaaggaagtcttctgcctcaacctcccaaaacactgggtttacagacatgagtcagcgtacccggctcagaacttttatccatattgttctcggccacattctcagaggctcgcacagcacctggctctcagcagatggacagaaggcacaggtcaatgaatgggcagcttaggtagggaagatggatttgaaggccatgtaagcagttaaagggatgggactcagtaattgatcaggtgtagcaatgagggagagaaagattcccagctctagactgaggtcaggctgtgagctcagagcaaagcctgcagttcatcttggtagcagctggatcactttgagcacagtgctgacctttctgtcagcctcaacttctccctctgcaaattaggaatcctaacagtgtccacctggtgaggtcactgaggcgatgacaggataaaccacaccaagtgtctagctcatagcatggtactccacctttcagaaatattaccttggctgggtgaggtgcttcatgcctgtcatcccagcactttgggaggccaaggcaggtggatcacctgaggtcaggagttcgagaccagcctggccaacatggtgaaaccccatctcgactaaaaatacaaaaattagccgggtgtggtggcgggcatctgcaatcccagctacttgggaggctgaggcagggagaatcgcttgaatccgagaggcggagattgcagtggactgagattgcaccactgcactccagcctgggtgacagtgagactccatctcaaaaataaaaaaaaaataaaaaatattagctcaaggcctcctctaggagagattaggtcagactgttcctcctgcagcaaggccctttgcagtatggaaaaacctcagaggtctgtgcagaagagagactatctagggacagatttcaacaaagccagtgccaaggaggcgcgtgtctacagcggagctgcggcctttagaagcctccagcctcccctcctggcatggacacagggaagccaactcccttggccagagccaggagccaggagccacaccagctcgctgatttccagaaactcacaattgcccacttactcggcacagcctgtgcgccacggaggaaactggaaaggagggatctccttggaacattctggcagctcagcaaagaggggggaagaattaatttcggatcctgaatttgcatctgcaaatgctgttttcgttcaaacgctttgtgttgtcttgtttttggtggtgttttttgtttttttttttttttttttttttgagatggagtctctctctttcgcccaggctctagtgcggtggtgtgatctctgctctctgcaacctccatctcccaggttcaagtgattgtcctgcctcagcctcctgagtagctgggattacaggtccccaacaccacgccctgctaatttttgtatttttagtagagacagggtttcaccatgttggtcaggctggtctcgaactgctgaccaccagttatctgcccaccttggcctcccattgtgctgggattacagacatgagccacggcacccggccctgtgttgtcttgataagagtttaaagtgactggatgttggggctatatatccaccaccaacaacctgccatacatccttttaccctcaaatttttgctctttgaatcctaactgctcctggcagtaaaccccatctaggactacctgccaacataccttaaacttttctgtctctttttttttttttaattatagagacagagtctcactatgttgcccaggctattcttgaactcctgagctcaagcaattctcccacctcagcctcccgaagtgctgggattacaggcataagccaccacactcagccaaacttctcaaacaatactcttcttaagccatatctcaggctctcatatgccctactttttgcatgaggctaactatttctttctctacccgcttcttcaataaaaccaaactaaacaataataatcaacaatggtgatagtaatcattgtaacacctcattcccgggggtactgggaattcactggaaagggctgggatgaggcaatgtcctccattttgttttcagtggtggttacacaggtgcatatattttttgtcaaaattcattgaactcaatgcttcagatctgtgcattttattttattttatttattttgagacagagtctccttctgtcaccccggctggagtacaatggcctgatcttggctcactgcaacctccgcctcctgggtttaagcgattctcctgcctcagcctcctgagtagctgggattacaggaacgcaccatcacgtctggctaatttttgtatttttagtagttggccaggctggtttcaaattcccgacctcaagtgatctgcctgcctcagcctgtcaaagtgttgggatgacaggcgtgagccactgcaccccggccatgtgcattttattgtatgttaaatatttcagttgttggccgggcccagtggctcgcacctgtaatctcagcactttgggaggctgagggtggatcacgaggtcaggagatcgagaccatcctggctaacaagatgaaaccctgtctctacttaaactacaaaaaatcagccaggcgtggtggcaggcgcctgtagtcccagctacttgggaggctgaggcaggagaatggcgtgaacccgggaggcggagcttgcagtgagccgagatcccgccactgcactccagcctgggcaacagtgcaagactccgtctcaaaaaaaaaaaatttcagttgctaaacttaatcaaagaaataacagtagctacaataggtcacaatgtacagctgcaatataactacaatgctagcaacaatgtaactaccatgtttatcattcccgtatcctcttctctgatcctcacaacgagcttgtgatacatgttgggtttggttttggtgttgattttttgagacagtctccctctgtcacccaggctaaagtgcagtggcgccacctcgccatctcggctcactgcaacctccgcttcctgggttcaagtgattctcctgcctcagcctcctgagtagctgggattacaggcaccagccaccacacctggctaatttttgtatttttaatagagacggggtttcaccatgttggccaggctggtcttggactcctgacctcaggtgatccacccacctcagcctcccaaagtgctgggattacaggcgtgagccaccatgcccagcctgtgataccttttggttcccattttacaaaagaggaaacagatcccggagaactccagtggacttgcccagagccccacggctactaacaggttaagcctggttccaaaccatcgtactatgctgtgtggcctggcatgtgctaggtagggggagaaagaaatgaaacatgactgcaacttttcagaaacttctacaagcaagccctgaccccgagtgctgggaaccaccctatcaatgaaagaaaccccacacactgcccactctgctgtcctgctaccctgcacatcctatgccttataccaaggatggccaatccctgcaacactgggtcacccaggaaagctaaacgtcttttgttttttctttttctgtctttttttttttttttttttttttttgagacgcagtctcgctgtgttgcccaggctggagtgcagtggcacgatctccgctcactgcaagctccgccccctgggttcacgccattctcctgcctcagcctcctgagcagctgggactacaggcgcccgccaccacacccggctaatttttttgtatttttagtagagacagggtttcaccatgttcgccaggatggtctcgatctcctgatctcgtgatgtgcccgcattctgtcacattctgtcacacaggctggagtggtgcagtggcgcaatctcggctcactgcaacctccacctcccaggttcaagtgattctcctgcctcagcctccctagtagctgggaccacaggcgcgctatggtgtccagctaattttttttatttttagtagagatggggtttcactatgttgggcaggctggtctcaaactcctgacctcaagtgatgatccgcccacctcaggctcccaaagggctgggattacaggcatcagtcactgcatctggcccctattattttaaatggaaatggggtctttctttgttgcccaggctggagtgtagtggtgcgatcataactcactgcagcctggaactccctggctcaagcaatcttcccgtctcagcctcctgagtagctgggactacaggcacatgccactacacccaattaatttttaaattttttgtagagatgggggtctcgccatgttgcccaggctggtcttgaagtcctgggctcaagtaatcctcccacctctgcttcccaatgtgctgggattacaagtgtgagccacactgccagaccaagatgatttaaagtatacaggaggatgtatgtaggttatgtacaaacactacgccattttatgtcagggactggatccccaggggggttttggaatcattgaagataccaaggcacaagtgtacaatctatccaggagaaaatgaaaatgggagaatcgacagttccgagtatcaggatctaaggaggagatttcaaaacactgcttttcatatcctcccatcatgaaaacaagggtttttcaaaaatctcttcttaaaaatatttctgggcccggcgcagtggctcatgcctgtaatcccaacactttgggaggccgaggcgggtggacacgaggtcaggagatcgacaccatcctgactaacatgatgaaaccccatctctacgaaaaatacaaaaaattagccaggtgtggtggagggcacctgtagtcccagctacttgggaggctgaggcaggagaatggcgtgaacccgggaggcggagcttgcagtgagctgaaattgcatcactgcactccagactgggcgacagagaaagactccgtctcaaaaaataataataataataataacaaaataaaaaaaatttctggaaatagacttttcacagatggttgtgagggccagtattcaatcatcacttgcaatcagtcagccctgacttctcctttggcacttatctgcttaactacaaactcagtcaacagtctaaaagcaaggcaagtttcaacctgcagctcgtccaccctttgagaaccctgagaagatcattagaccactgctatgctctcccctctccaaacacagtcacgaactccctacattcttactccttgtgtctgaagatgaataaccaccctaaaattatcgctctcaactctctcacaggaaagaaaatttccaggactctagaaaataagattctgcaaatatccatgtgtctggcgctagagcttacggaagattttcaaagccacagtgtggagctaattaaattaattacaacaccctgtgaaaaatcagctgcttttcaaagatactgttaagaaagtgaaaggggccaggcgctgcagctctcgcctgtaatccaacactttggaaggatgaggagggagattgcttgagatcccaggggttcaagaccagcctgggcaaggtagtgagacctcatctttacaaaaataaaattagctgggtgtagtgatgtgtgcttgtaatccaagctactcaggaggccgaggtgggaggattacttgagcccaggagttcagggctgcagtgaactccagcctgggcaacagagtaagatcctatctctaaaaataataataacaataataataataaagattgacaataaatattaagtgctgctaaggatgtggagcaattagaactctcatacattgctggtggaaatataacagactccaaccacttaggaaaacaatctggcctttcctttttttttttttttttttaaagacagagtcttgctttgttacccaggctggagtgcagtggtgcgatctcagctcactgcaacctccacctgctggattcaagcaattctcccaccatagcttggattataggtgcccaccaccacacccggctaatttttgtattttgagtagagacggggtttcaccacgttggccaggctggtcttgaactgctgacctcaagtgatccacccgcctcagcctcccaaagtgctaggattacaagcatgagccaccgcacctggcctgcccactccttatacacacttctactacacaactcatccattctgctccaggatataacctcaagagatatgaaggcattggtccacataaaagactcctacacaattgtgtataacaggttcatgcaggtttatgaataatagccaaaagttgaaaacaacccaaatgtctctcaacagctaaaatggtgaaactaaatgtcgtctctccacacaatggaatgctactgaacaacacaaaagaaatacgctattgataaatgcaaaaccatggatgaatctcaaaacattacaccaaagaaaagatgccagacattggccaggcaccatggctcacgcctctaatcccagcgctttataaattacttagtctcactcttatcctaagtgaagtaaatcaggaatggaaaaccaaacatctatgttttcactcataagtgggagctaacctatgaggatgcaaagtcttaagaatgatacaaggcccggcacggtggctcatgcctgtaatctcaacactttgggaggccgaggcgggcggatcatgaggtcaggagatcgagaccatcctggctaacacggtgaaaccctgtctctactaaaaatacaaaaaaattagccaggcatggtggcaggcgcctgtagtcccagctactcgggaggctgaggaaggagaatggcatgaacccaggagacagagcttgcagtgagccgagatcgcgccactgcactccagcctgggtgacagcgtgagactctgtctcaaaaaaaaaaaaaaaaagatacaatagactttggggactcagggggaaaggataggaagtgagtgagggataaaagactacaaattgggttcagtgtatactgctcgggtgatggatccaccaaaacttacaaatcaccacgaaataatttactcatataaccaaataccacctgttcccccaaaacctatggaaataaacaaaaaaacaggccagacgcggtggctcacgcctgtaatcccagcacattaggaggccaaggcaggtggatcacgaggtcaggagttccagaccagcctggccaatatggtgaaaccccgtctctactaaaactataaaaattagccgggcgtggtggcaggcacctgtaatcccagctactcaggaggctgaggcagaagaatcgcttgaaccggggaggtggaggttgcagtgagcagagaccatgccactgcactccaacctgggcaacacagggagactctgtctcaaaaaaataaataaataggctgggcgtggtggctcacgcctgtaatcccagcactttggaaggccgaggcgggtggatcatgaggtcaggagatcgagaccatcctggctagcatggtgaaatcccgtctctatttaaaaatacaaaaaattagccaggcatggtggcgggtgcctgtagtcccagcaactcgggaggctgaggcaggagaatggcgtaaacccgggaggtggagcttacagtgagcgaagatggcgccactggactccagcctgggtgacagagcgagactccatctcaaaaaaataaataaataaaattaaattaaattaaattaaattaaatttttaaaaatttaaaaaatacccagtctcagatagttctttatagcaatgtgagaatgaactaatatcctctcatcccaaaatcaaaatgttcagttatgtacaaaaccaggaagaaaaaggcaaaaaagggaaggggaggtttccctccatcttgggcatgtttttatactcattcatttcccagaggaaggatggaaagaaaatcctcctagaacagacttgacctggccaaacaagccctgaaatcatttgaagagaccaggattgaatgtagaatcataaagtaaatccataactgtttccctcccacactaaggaagttctccatctctcaaaatccaaaagcaaatgaaataatagagggaaaaaaaaagcaccaagttcctggacaaatgccacattccacatcaacatagaaaacgtccacgggcaggagatggactttccattgatgcaacagaaaatggaaaaagaggccaggctcagtggctcacgcctgtaatcccagtactttgagaggctgaggtgcgtagatcacttgaggtcatgagttcaagaccagcctggccaacatggtgaaaccccatctctactaaaaaatacaaaaattagccgggcgtggtggcatgcacctgtaattccagctacccgagaggctgaggcaggagaatcacttgaacccaggaggtagaggttgcaatgagctgagatcacgccattgcactccagcctgggcaacagagtgctccatctcaaaaaaaaaaaaaaaaaaaaaaggaaagggaaagtgaaccaaaaagtgaacccagccatgagtctcatctctcgtctcagccttcaaagaatcacaagggtccaggccggagaacttttgtactgccctccattccctccatattcctcactggaaagaggctcctatgggctaagtctctcaatgggccccatgcttcaatcaggaaggggtgggcttccactatgtgtccccaaaacttgggcagccacaaacagatatttgtagacccgtgtttttcccagcgttagttacaatggccagaaggcggaaacaacccaaatgtccatcaacagatgaattctcaaaaaaaaaaaaaaaaaaaaaaaaggttaagatggtcaattttatgatgcatgtcctattattactacaaaaaaaaaattacagatttaaagaagagcaactgaagatatccaaacatcagcatctcaaagagatttaaaaagatggatgcttattagtctaactgggtttctatctggccacaatttcaagtgagaaaagcaaagcaaagcacaattgaaatgctgggtaaagaaatgcaatgacagcagcaaagcatttccgacacttcaatcccttgtgcacctctttgtgacgttgccaatgcagagtccctgaagaaaaaggcccagcccccccaccccaaaacagctcccagggaaagaggaggaagaggtaggaagacatggctaagaagcatacagagagattcccagtcttaccaggaatcagggagatgcaaaagaataccataggataccaatttccatgcactggaattaacataattttcctgcagccttgcccacatttgacatataccttaatgcatcactggtgaaactgtcacagccaccttggagaccattcggggagtatatactagatctaaaaatgcacatactccattccctgtgacttcaattctgaacatcaatcctagaaaaccattcacaaatgggtaggaggagatggacaccaagatgttcattgcagcattgtttataaaagaaacaaaccggaaacaatctcaatgcctcccactaggggagctggtgagtagcatgtggcttattcatacaagatactatgtagcacttaaaagaatgaactagcaatactgaatcaagaggcataaacttaaagaacatagtggctgagaggaaaaaaaaaagcatttggcttaagaactcatgcagcaggtgtagcaattggaatcacaatcacaaaaatatcatatgtgtgcatggtgaggaagatcgcagagttttttgttttttggttttttttgagacggagtctcactctgtcgcccaggctggagtgcagtggcgccatctcagctcactgcaagctctcgcggagtatttttaaagactagatccattacagcaggaccagccacgtgtggccagtcagaactgaaatgtgctttacgtgcaaaatacacaatggcttcctaagggatagtactacttagcttcccaatatatgcagatatttagaatactcaaaagtgtattacaatataaatggcagtgtttaacaccagtgaactgtatactgaaaaataaataagatggcaaattttatgatgtatattttattacagcagcgaaagatttaaagaaagatttatgccaggcgtggtggctcatgcctgtaatcccagcactttgggaggctgaggcaggtggattacctgaagtcgggagtttgagaccagccaggccaacatggtgaaaccccatctctacaaaaatacataaattagccaggcgtggtggtgcacacctgtaatctgagccactagagagcagaattgcttgaggcaaggcggaggttgcagtaagccaagattgcgccattgcactccagccagggtgacaagagtgaaactcgttgtcaaatacaaataaataaataaatagatttaaagaacaactgaagataacccaaaatccaaaatcttaaatgctccaaaatttcctggcccgaaaatccaaaatcctaaatgctccaaaattcaactttttgagcgccgacatgatagcagtggaagaaaattccattcctgacctcttgtgacaggtcacagtcagggcggtgaaaaccttgtttcccgcacaatattactgaaaatattgtatacaattacctccaggctatgtgtataagatgtacatgaaacataaatgaatttaacgtttagacctcgttctcagccccacagtatctcattacatatacgcacatattctaaaatcccaagtgggaaacacttctggtcccaagcattttgaataagggatactgaacctgtatctggcattgacgtgtgtacaaggttatgtgtcaaaatacatgcagggctggaagtttatgtaccaaacctaagagagttgttacctctgggaagaagggaggagaatatagcaagggaagatgacaaagagaactccaactgtatcttacattttattactttcacttattcactttttattttattttgtttttttttttttttttaagagatgaggccttgccctgttgtccaggctggagtgcagtggtgtgatcgtagctcactgcagcctccaactcctgggctcaaatgatcctcccactttagcctcgtgagtagccagaactacaagaacatgccgccacccccggctaaatttttttaaatttttggtagagatggggtcttgctatattgcccaggcgggtggatcactggaggtcaggagttcgagaccagcctgccaacatggtgaaaccccgtctctacaaaaatacaaaactttgccaggcatagtggcgtgcacctataatcccagctacttgggaggctgaggcaggagaatcacttgaacccgggaggcagaggttgcagtgagctgagatcgtgccagtgcactccagcctgggcgacagagcgagactgtctcaaaaataataaaataaaaataaatcagctgggcatggtggcacatgcctgtgatcccagcacttggcagtatccggagacatttttggttgtcatgacttggggttgctactggtattgagtggaggccagggatgctactaagcttcctgtaatgtacagggcagtccccaccacggagaggggttcagcccagaatgctaacactgttgaggctgagaaaccctgcctaaactcattaaatttaaaaaaagaagaaaacaagccaggcacagtggctcatgcctgtgcactctggaaggccgcagtaggaggatcactggacgtcaggagttcgggactggccaacatggtgaaaccccgtctctactaaaagtacaaaaattagccaggtatggtggtatgcacctgtaatcccagctgcttaggaggctgaggcaggagaattgctttgaactcaggaggcagaaattgcagtgagccaagatcatgccactgcactctagcctgggtgacagagtgagactcttgtctcaaaaaaaaaaaaagaagaaggaggaggagaaggagaaggaaaaggagaaagagaaggagaaggaggcaagccagatgtggtggtgtgttcctgtagccccagctacttgggaggctgaagcttgaggatccctttagcccaggagtttgaggctgtggtgtactatggctgtttctgaatagccactgtactgggcaacatggtacacatctttttaaacattctttctaaaaacagcaaatttcattttatgtgtgacttttactataaataaaaatgtttttaaaataataaaagttcagccgggtgtggtggctcatgcctgtattcccagcatttgaaaggctgaggaggagggcagatcacttgaggtcaggagttcgagaccagcctggccaacatggtgaaaccccgtctctactaaaaacacaaaaattagccaggtgtggtgtgggcgcctgtaatcccagctactcaggaggctgagacaagagaattgcttgaacccgggaggtggaggttacagtgagccaagatcgcaccactgctctccagcctgggtgacacagcgagactgcctcaaaaaaaaaaaaaaaaaaaacagctacaactctgcaactctggtgtaatatcatgaaaccaaaaatatttgcatgttgtgtaccacagaagctatttataaatgaaaattttggcctaaaaaaaaagaaagaaaaggaatccaaatcagaactcctctaaaaaagcagtaccctgttttcagtgttgggctactgctaaagcagagaaaaatgaggttttgggaagcgggacagattcttagagccatgttagcaaaattaccaaaccccatccccccaacacagacacacacaccactcttagtcttgaacaataaagacatacaaggagcacagactccagatggcagactaaaaaaacattattagatttccaatgaaaacttttgctgtagtggttctaacgtgacacagccctacaaaaataaagatgaatcacggcccatttcgaaggagaggtctgactgccttacgtcacagccagtcacacactgttttggtttttttttttttttttttttttttttttgagatgcagtctagctctactgcccaggctggagtgcagtggtgcgatctcggctcactgcaacctccgcttcctgggttcaagtgattctcctgcctcagcttcccgagtagctgggattacaggcgtgcgccaccacacctggctaatttttgtatttttagtagagacggggtttcaccatgttggccaggctggtctcgaacccctgacctccagtgatctacctgcctcagcctcccaaagtgctgggattacaggcatgagccaccgcacctggcctaaattttttcttaagttatcaaagaattgcttccccccaaaagttatggcaccataaaatttgtcaatgaatactcagttacctgctatttcattttatgtggctagaacacaataaataatccaaactgatgaagacattgcaaaataaaaccaaccaaaaacatagcccaatttcactcatgaacacagatggcaagaattcagaaaacgaaacaaagcaaacctagcaaatcgaattcaacgttatgctgaaagaataattcatcacaaccaagtaggttttaccacaggaaagcaaggatgattttatattaggaaatctattaaacatagatgtcggataataccattgttaaatatttaatgttagtctagaagccctggtcaatagaataagatttaaaaccgaaacaagaggtatgattttagacataatttttttcatgcttccagaactgagcagacataatttttttaaatgaccataatttgtagaggacgaaattgcacacaatgaataaaacaatttaaaaacctaccaatcaatttcactaaagtatctggattcagggtaaatatgctattcatagtagccataactaacacaacaaaactctgtgatacagaaatcaggaaccatcgtcacaaaaataatacaggataaagatgaagaaaggacaatataaaagatttgaacaaattggctgggcgcagtggctcatgcctgtcatcccagcactttgggaggccgaagtgggcagatgacttgaggccaggaattcgagaccagcctggccaacatggtgaaaccccgtctctactaaaaatacaaaaattagccgggcatggtggtgtgtgcctataatcccagctactcaggaggctgaggcacaagaattgtttgaacttgggaggcagaggttgcagtgagccgagatcgtgccactactctccagcctgggtgacagggcgagactctgtctcaaaaagaaaaaaaaagatttgagcaaatggaaaaggagatcccatacctgcccggaaaggaaaaatacgaaagtattgatttcttaatttatggattttaacccatttttccatttgtcccaagaataatctattctctaatcctaatgtaacattatagacatttctgttacattaagattagagacaagttctgtttagaaataactccaagaaccgttttatattttctcatattgaaaatcagtcagatttgcttcagcctcaaagaacatgtttatgtaaaattaaaggagtgctggcagcgagctgcactttttttcctctgggaaatgggttatgtttttaattaaatttttaaatcaatatctcaatgggtttttttgtttttgtttttgctttttttttttttttttttttcaagatggagtctcgctctgtcgcccaggctggagtgcagtggcatgatctcggctcactgcaagctccgcctcccaagttcacgccattctcctgcctcagcctcccgagtagctgggactacaggtgcccaccaccatgcccggctaatttttttgtatttttagtagagacagggttttaccgtgttagccaggatggtctcgatctcctgacctcgtgatccacctgcctcggcctccccaagtgctgggattacaggcgtgagccaccgcgcccagccctcaatgggttttatatgagagtgagaggagggaaatatttagttcaaccagaaaaggaaacactcttctaaaaggtgtaatagggaaaaaactagatttgccactttataaagcatgttcttaccaggcatgagcttgtagtcccagcaacttggaggctaaggaggatcacttgcacccaggagtttgagtccagcctaggcaacacagtgagcccccattctttttttgaagacagaatctcgctctgtcacccagactcaagtgcagtggcacaatctcggctcattgaacctccacctcccaagttcaagcaactctcctgtctcaggttcccaagtagctgggactacaggcatgtgccaccatgcccggctaatttttgtatttatagtagcggggtttcactgtgttggccaggctggtctcgaactcctgacttcaagtgatccagccacctcggcctcccaaaatgctgggattgcaggcatgagccaccacgcccagccgagccccacttctttaaaaacaaaacgacaacaaaaacaaaactaaaaaaacacatattctaaatctataaacagtatggtactgggataagattaagacacagaggacttgaaatagaattgatatcccaaaagcaaattcatggttttggttgaatttaatacctgatgaagaaaacatcaagaattactggggaaggaattggttattcaacaagtggaattcataaagttaaattcctactcaaaaaaaaatcatttaatgtcctcagtcacaccatacacagtcctgatgtccaattgagctccaaattctgattaaaatgttattgtactcatgaacctaaaataagaggtttttaaaaaaatgttttatgagccccactgtttcccactccagggttctttggcagatggcaaacagggccacaaattcttcctcttccatcaacaggtaaagactatattctccctttccctcccagctcaccttagccaatgggatgttagcacacaagatgcaaacagaaactcaaaaggcacttttgtactggaaattgatctcttgccactcttggaacgctgagactatcatgtaatctaagcccaaactagccaactggaggatgagcagctacagggaagaaaaccaaggcctcccagctgacagccagcaccaaccaccagacatgtgagtgaggccatgctagaccatccagctaccagacaacccactggttgatcccagacatgagagagaaaagagcctgtgtttgtggtcagctggtgggtctaaacaagaaaacttgcccagcgacccaaagaatcatgagctaagtacatgattgttgattaagccattacgtttcagagtagtttgttacacagcaaaagttagctgataaaagttccatgattgaacgtggatacaacaagttcccagttttatgtttcagggtggtttgttacacagcaaaactagctgatacaagctccatgattgaacttggatacaacaagttctaagttctatgtttcagggtggtttgttacacagcaaaaattagctgatacaaactccatgactgaacttggatacaacaagttccaagttgtatgtttcagggtggtttgttacacagcaaaagctagctgatacaagctccatgaatgaacttggatacaagttcctagttctatgtttcagagtggtttgctacacaggaaaagctagctgatacaagctccatgattaaacttgaatataaattccaaggtctgtgtttcagagtggtttgctacacagcaaaagctagctgattcaagctgagagccctgtgttgccccagttaacacactgcccccacctcatggcttaagtgaatccaaatagattcccattactggcattcatgtgttgactgagacactcagtgctgagccaggaagacaaactcaggctggggttctctcccacggccccttccccatccttaatccacttcctccaaacccacacccattttactccacttaagctgcaatgcactgttctctgttcccagagaggagaagccaggaaggagctgacacattcctcattcttggtgacccacagacaagacactctgagccccggtcaacacacctactccttccttgttcctcttctcgattagatgtacctataatagcctctttgttgtgatcaactttcccaagccactccttcctctctattccagggactctcaaggggtggagaggttgaaaaaacattcaacggtatattttatatttagaggaaaaaagaacaaactccaagtagggaagaggaactggatttttatttttatcgaaagaggggatataccagttcaaagctgaggaaaaccttggagactggttcccttatcatgtcctcatgatagaagaaaaaacagacattcagaaaagctagacaatttgcccaaggtcacaaaacagatataggcttcaaatgcaggcctgtctgactccagaacaatctttcatcatggaatgaaaagttctaaggcagaggtacccaatacaagtttttgcagtgatagcaacattgtctgtctgcattgtctaaatatggtgagtacaactgagggacaaatatctaattttaatgaatttctacttaaattgccacatgtggctgtggctggcagagctaccttagtggacagcgtcattctagaatttcactaagttggttctatatcactaccaaaagcaggacccagacaggtgcagtggctcatgcctataattccagaactttgggaagccaaggcaggaggatcacttgagcccaggagttcaagaccaacctgggcaacacagcaagactccatcttttattttttattttttatttttttatttttggagacagggtctcgctctgtcacccaggctggagtgcagtggcatgatcttggctcactgcagcctcaacctcccaggctcaagcaatcctcccacctcagtcccccaggtagctgggactacaggcgtgcaccaccgcgcctggctaattttgcaaaaatattttttaaaaattagtcaggcacggtggttcatgcctgtagtgccagctacttgggaggctgaggtgggaggatcacttaagcctgagaggttgaggcttcagtgaggtgtgattacatcactgcactccagcctgggcgacagagggagaccccatctcaaaaaaaaaaaaaaaaaaaaaaagcatgaccctcaacatacatacccacccacccagaagaagtggcaactgaaagatttcagaaagactttaagggacaaatagcatgaggaaaatgaagttatgagtaaacctgggaaagcccttcataaatattctaatgtcctctaaaatacagtagacaacccacgccattcgacacttaactgagttagcaagaacaagttctgaagaatggattatcctggactattcccggttggccagaatttttttttttttttttttttgagacggagtctcactctgttgcccaggctggagtgcagtggcgtgatcttggctcactgcaaactctgcctcccaggttcaagcgatggtctcctgcctcagcctcccacgtagctgggactacaggcatgcgccaccacgcccagctaattaagtatttttagtagagacagggtttctccatgttgatcaggctggtctcgaactccccacctcagatgatccgcccacctcggcctcccaaaatgctgggattacaggcgtgagttactgcgcccatgtcccccagtatcttttgaagccatcctttcaaaactaaaagtctgtgaagaattacactttcctctgaactacattgacaaatttaagaccatcctctaacttttttcctgcatcaaattcatccttccctgggaacctctttcctttcagaggttcagctatcgctctccccgtgacatctgtgatgacgtcttctgcccattccatcttctttaccaccaggaatcctaaggtaaacctcttgctttttttctcaccccagtaaaattcctttgcaaataaccttcatacctttctcgcttataaaaataattttcttagcaaaacttgccttcgtcaagaacacaaagttttgttatgaagttcggtctgtgccctgtttgtcagacactaaaaaaagggaggcccgtcggcaccgttttaccgcagaaccgaattcccagatggaacctcatatagctttatcactcaagtatggatctctagacaaatatttagtctggcccatttttaaaaaatgggtacacctgtaatcccattgaattgggggaggctagtgtgccagaactgcttgagccctggagttcaagaccagcctgggcaatatagtgagactccatctgtacaaaaaataaattaaaaaaaaattagcggctgggcgcggtggctcacgcctgtaatcccagcactttgggaggccaaggagggtggatcacgaggtcaggagatcgagaccatcctggctaacagggtgaaaccccgtctctactaaaaatacaaaaaattagccgggcgtggtggcaggtgcctgtagtcccagctactcaggaggctgaggcaggagaatcacttgagcccaagaggtggaggttacagacagctgagatcgcaccactgcactccaacctgggcaacagagccagactctgtctcaaaaaaaaataaaataaaataactgggcatggtgacaggggcctgtagtcccaactactctggaggctgaggtgggaggatggcttgagaccaggagttccagactgctgttagctatgatcatgctactgcactccagcctgggtgacagagcaagaccctgtcgaaagaaaagaaagaaagaaaagagagggaaaggaaaggaaaggagaaaagaaagagagagggagggaaaagaaggaaaggaagaaaagggaagagaggggatgggaaggaggagaggggaaggaggggaggagaagaaggggaggggaggggagaaaaatgaaaggaagagagagaaaaagaaagaggagggagaaagggaaagaggaaggaggagggagagaggaagggagagaaggaagggaggtaagaaataaaaagaaagcaaggaagaaagaagaaaagaaagaagaaagaaaaggaagaaaagaaagaaagaaaagaaagagaaggaaggaaggaaagagagaaggataaagggaggaagggagagggagggagagaaggaaggaagggaggaaataaagaaaaaggaaggaaggagggagggaaggaaggaaggagaggagggagggagggagggcagggaggaagaagatgagagttcgggcaaccgtgtttaaaaaacggtgtgtttttctttaaaacaaaagaaaaagaaaaaaaatcaaagaacacaccaccactcagagccatgtgcaaacgaacagcatcaagcatggtcgcctttgaaaacagctgactgcagagagtgctgaaatggtacttgttaaataaagtcagtccaagaggtagaacctgagtgtgaccctagctctgagtctggagctcagaggggcaagcagaactgtcccaggaacgtacgatcagcaacactcagactggggactgcaccccaagccagaaagcccagctcttcaacagagagaaggtaaaaggaaagggatggagggagaacctgtggaccaggctttctgcccctcagcactattgacatttggggctggatcattctttgtggctgggctgtctctgcattgcaggacgttgaacggcatccctggcctccatctgctcaatgaaagcagtacacacacattccctggagttgtgacaaccaaaaaatatctccagacattgccaaatgtcccctgggagacaaaaaaaatcaccctcagttcaaaaccactgctagagacccaaacaaacacatcaatttattttattgtgttaatttttgagccagggtcttgctctgtcacgcaggctggagtgcaatatgcaatctcggctcattacagcctcaaccttctgtgctcaagcgatcctcccacctcagcctcccgagtagctgggactacaggcatgcaccaccatgctcggctaattttttattttatttttagtagagatggggtctcactatgttgtccaggctggtctccaactcttggcttcaagtgatcctcccgcctcagcctcccaaagtgctgagattacaggcatgagccaccatgcccggccatcaatttttttttttaatgggcaaagctaaatatttgtctacagattcacacttgggtgataaaactatacagaaagaaggaagtgatgtctacaaaagacaggacagtgactactctgggggaagaggcctgtgactaggatgtggtccgtggcatggcttttggagggggtgttctggcaaagtactatttctcaaccagagttagggattatatgagtgttgacgttagagtgaaccattaggctattcatttgtttggtgtggcttttctgaacctgtggtttttttatgtaataagatagaattttttaaagtaaaaccaaaaaaagaaaagaaaaagaaatcttgattccattaattaaatatagaattaccaactgacccagcgattccactcctaggtataacttcgaaagaagtgaaaatagcccaggtgcggtggctcacgcctgtaattgtagcactttgggtggctgaggtgggtggatcacctgaggtccggagttcaagaccagcctggccaacatggcgaaaccctgtctctactgaaaatacaaaaatttgccagtgcgtagtggcgcacgcctgtaatcccagcactttgggaggtcgaggtgggtggatcacttgaggtcaggagttcaagaccattctggccaacatgacgaaaccccatctctactaaaaatacaaaaaaagtagccaggcgtggtggtgttcacctataatcccagttactcaggaggctgaggcaggagaatcgcttgaatccaggaggttgcagtgagctgagatcacgccactgcactccagcctgggtgacagagcaagactccatctcaaaaaaaaaacaaatttaaagaaaaggaatcttgaccactttggatcaaacccgtctgctaggttagtcaatttatttgcaaatgaggaaactcttaacatcatcaccaccaatgaggcagcctgggacaagagccttgttcaccagccgacgggctttgcaggtggtcagtaaacaacgccgtgcttcgcacaccgcgtgtggacatgactagctgccagcgctttaaagcccatccttatcagacctccgagtaaaaatgttttccttccccaggtaagcccttggaaacactcggtaataaagcctattaaacaaccattctttctgggctacactcaataagccatggagtcattaaagatccaagaccctcctcgcctgggacaaaacgagaggcaaagaaacttctaggataaagaagccacagccaggcgcggtggctcacgcctgtaatcccagcaccctgggaggccaaggcgggcagatcacaaggtcaagagattgagaccatcctggccaacatggtgaaaccctgtctctactaaaatacaaaaaaattagccgggcgtggtggcgggcgcctgtagtcccagctactcaggaggctgaggcgggggaatcccttgaacccgggaggcggaggttgcagcgagccaagatcgtgccacagcactccagcctggtgacagagtgagactccgccaaaaaaaaaaaatagaagaagccacaggaccctctaccccaaaccctctaggtaggtacttgacaatggtgggcttcacctaccacatgccctacagtgtaattttttatttatttatttgtttatttatttatttaattatttgatacgaggttttgcttttgtcacccaggctggagtgcagtgacgtgatctcgactcactgcaacctccacctcccgggttcaagcaatcctcctgcctcagccccccgagtagctgggattacaggttccaaccaccagcccggcttatttttgtatttttagtagagacggggtttcaccacgttggccaggctggtctcgaactcctgacctcaagtgatctgcccgcctcagcctccccgagtgctgggattacaggcgtgtgcctggcccctccagtgcaaatttgatgatcatgctaagtccagtgtgttgaaagactttggtccacttcccaaacctgtgattggaggaaggtggcccaatctgcagccactcctcgggccccaggatgataggtaaccagggagcagaggagagcaatgctttcaacactttcttgtttgcttcccactcttgacatcatttatgtttaaaaatgagcaaacgggccgagtgtggtggctcacgcctgtcatcccaacactttgggaggctgaggctggtggatcatttgaggccaggagtttgagactagcctggccaacctggtgaaaccccgtcttcactaaaaaatacaaaaatcagccgggcgtggtggcatgcccctgtaatcccagcactcaggaggctgaggtaggagaatcgcttgaacctgggaggcagaggttgcagtgagccgagattgtgtcactgtgctccagcctgggtgacagagcgaaactccatctcaaaaaaaaaaagaaaaaagaaaagaaaagaaaaaaggaaaaggaaaaatgagcaaacaggtcggcctggtggctgacacctgtaatcctaacactttgggcttcccaaagtgggaggattgcttgagtctaagagttcaagaccagcctgggcaacatagcaaaatccccatctctacaaaaagaaaaatttaaaaaataaattagccagggatggtggtgcgcacctgtagtcttagctaatgggggaggctgaagcgagagggtcacttgaggacaggaatttgtgagctgcctgggaaacatagcaagactccatctctttaataaataagtaaataagtaaataaaattagctgggcgtggtggcatgcacccatagttccagctactggccaggctgaggctggaggattgcttgagcccaaaaggctgaggctgcagtgagctatgatcgcaccactgcactgcagcctgggtgacagagcaagaccccatctcaaaaacaaacaaacaaacaacaaaataaaaaagtagagagggaagacagaggaaaggggagataggataaggggtacaatcttgaaactccagcacacacatcacctccttttactgggaaatgcacggttctatctgacacaggcgcattgagagaaacagatcactgaaggacctgggctgccagcctgacgcacaggcgctcgctgacttccttgggtcctccccggggcatttcaggtgttcagtcacaaagaacagattttaattctgacaaagggtcgggtgacatgggaagtaaccggtcagtgagtatcaggtaggaggaaggaaaagaaaaacttgtcaggccagtcaccaagttagcagacagccaaagggaaagccgcctttccattacgatggattttaactctacccgccttcttcccaaaaggattgggccaaaaggtcagtttcaactgatagccctcagcctcccccggcccccctccccggtccccgcacccacccgctccaggaagccaggcaatggtgggaattgtaaattcgttatcttcaccactcaagatttagacagcatcatctctggggcagccaagtgaccacacggtcaactggtctaccatctttcagcgcagccttgaacccaccaaaacactttctgcccacccatcagcttatctaacctgatagttactttgacttcctccctgactcagcaaggacttcggggacgcaacaaaaagcctggctcagcaaggctgtccactcagtattggtggaaacagcccctcctaaacacagcccctgtgtgaccttcatgacggcattggagcccataaggaccctgcactggtccaagcctcccttcccggcatgaggcaccctcttcactcttgcccacaaaacgcctcttggccttctctttgccatttcatccacccgaatacccttccctctcaccctgtcttttctttttttttttttttcttgtcttgtcttttctctttctttctttctttctttccttccttccttccttctgtttttgtttgtttgtttttgagacagggtctcactctgttacccaggctggggtacagtggtgtaatcatagctcattgcagcctcaaagtcccaggctcaagcgatcctcccacctcagactcctgagtagctgggactataggcacacagcaccatgcttggctaattttttaaaattttttgtagagatggggtcttgctatgttgcccaggctgagctcgaattctaggttcaagtgatcctcctgcctcggcctcccaaagtgctgggtttacaggtatgacccaccacacccaacctcatcttctttctttgtgatccttgccacccaaaccaaagcacatctctgccactccaatctggaacaatctctcctcttttacaaaggccaacggcaattcatcttcaacccccggaagaggagccgggagcccagaaacatactctctagggtacttgttctttcctgctctacaaaatccaatcatctccaaagtgaaaagtttgtttaaaaaatttcaatcaaatttttaaaatttattttattttaaaataaaataaaaatgaataaataagggctgggcatggcggctcacgcctgtaatcccagcgctttgggaggccaaagtgggaggatcacctgaggtcaggagttcgagaccaccctggccaacatagtgaaaccctgtctctactaaaaatacaaaaaaaacacaacaattagccgggtgtggtggtgggcgcctgtagtcccagctacttgggaggctgaggcaggagaatcacttgaacccgggaggcaggggttgcagtgagccgagattgcgccactgcacttcagcctgggcaacagagcaagactccatctcactaaataaataaataaataattccaatcctggctggcacagtggctcacacctataatataatgcaacagtttgggaggttgaagcaggtggattgcttgggcccagcagttcaagaccagcctgggtaacgtggtgaaaccccatgtctacaaaaaatacaaaaattagccagcatggtggtgcgtgcctggaattccagctactcaggaggcggaagtaagccaagattgcgccactgcaccccagcctggacaacagagttgagacccttgtctcaaaaagaaaaaacaagaaaaaaaaatgccaatcatctgagtgaaaaatgaattacaactactgtggaatttttttcagtacagttttttttgtttgtttctctcctagattttttttttaaagatctttgacaacataaaagggaagaaagacgaatgagagattcaagtgggccatcattcacgttacatgctctaccctacctttttttttttttttttttttctttttttgagatggagtctcgctgtgacacccaggctggagtgcagtggcacaatctcggctcactgcaacctccgcctcctgggttcaagcgattctcctgtctcagtctcccaagcagctgggattacaggtgcccaccaccatacccagctaatttttgtatttttagtagagacggggtttcactatgttggcccagggtggtctcgaactcctgacctcagttgatccacccaccttggcttcccaaagtgctgggattacaggcctgagccaccgtgcccggcctcccccaccttatctttttctttttgttggatccccgtgtgcaggcgttacactttcctgtcttctgtatggacgacagtgacatcgccacaagggaatttatcaatattccctgttatctagagaacatcatgatttccaggtgctctgctccaaacacgtctagaagcacgggttcgatgactcactcgaaggggaaaggcggggtgggaggagggaggagggtggagtgggggccttgccttgtacatatactgccctcctccacccaaacagagagctccaaaaaaaaaaaaaaaaaatgctaatcatctgagtgaaaaatgaattacaactactgtggaatttttttcagtacagtgctctaccccacatttttttttctttttttcttttttgagacagagtctcaaaaagtaaggaaggaaggaagaaaggaaggagggaagaaagaaaaggaaagaaaggaaggaaagagggaaggaaggaaggaagtaccagcaaagggcagctgggctgtatggcctcaggccgtggtgctcccaagtcccactgaaacagcctctatccctgaatgctgaatgtccagctcatatatagacagagtctcaccctgtcacccaggctggagtgcagtggcgcaatctccactcattgcaacttccgcctcccaggttcaagtgattctcctgcctcagcctcctgagtagctgggattacaggtgcccgccaccacgctcagctaatgtttgtacattttttagtagagatggggtttctccatgttggccagggtggtcttgaactcctggcctcgagtgatctgcccgcttcggcctcccaaggtgctgggattacaggcatgagccaccatgcccggccaaaaatgtgaaaaagcattcttaagccaggcaagcacagtggctcacgcctatagtcccagcactttgggaggccaagaaaggaggattgcttgaacccaattgtttgagaccagcctgggcaacatagcaagaccccatctctactaaaaaaataaaaagaaattagctgggcgtggtggtgcctgcctgtggttccagctactgaggaggctgactgaggtggcagtggcctatgatcaccccactgcactccagcccaggcgacagagtgagaccccatctctaaaaataaaaataaaataaaaaattcttagctcataggtcatacaaaaatagcagctggcggactggatttggcccacaggtcgtagtttgctgatcactgggcaaaggccttacgtcagacaagtctgaagtcaaaccattccccagctaggtctcctagagcaagtctcataattcctagccatgcctcagttccctcttctgtaaaatgaggataacaaaccctcataggctgtgatgggatcccctaaggcattgcttagcacatagtaagtgctcagtaaacactagctattgatgagtgttaaggatgtcattgtcaactgtgagccaggtactatgacaggtgcttgagatacaacaaagtccctgccttcaggagagcttagtctgataggagaggccctaagtcaagacagaatgagaaggctgataagaagaggcaacacacatgttggcaggggcaaattctagatttcctctccagtttcttttccttctttccttccttccttccctccttcctttccttcttccttccttccttccctccttcctttttttctttcctccttccttccttcactccttctttcatttctccttccctcctttccttccctccttccttcctttctttcttccttcctttctccttccctccttctttccttcccgccttccctccttccttccttcctttctttccttttatttcttccctccttccttttttccttccttttcttttctttcttccctccttccttccttccctccttccttcctttctttttacagtttcctgcatttcaccaacttcccgcaatgacatctataagacacaaaggtaaagagcttggattctgagccagaatccccagcttcaaatcccatctccactacttactacccatgtgtgtggggtgcgcggcggaaggggtgggcggggcagtgttggaagtagaagttgcttaacctctcgaagccttagtggtctcaacaataaataagattgttgggaagatgggatgcaatatcctaatcaaagcacccagaaccacggctggcatgaaatcagcatttgccacaaagacaattccgattgttaaaataccaaggcaagcccagagtagtggttcacacctgtaatcccagcactttggtaggccaaggcaggcggatcacttgaggccaggagttcaagaccagcctaggcaacatggcgaaaccccatctctactaaaaatacaaacattagccaggcatggtggcacgtgcctgtaatcccagctactcaggaggttgaggcagaagaatcgcttgaacccaggaggcggaggttgcagtgagctcagatcatgccactgcactccagcctggacaacagagcgagactctgtctcaaaaaaaaaaaaaagaaaaagaaaacaaaatcaagtcaagtccagcgtggtggctcacatgtgaaatctcagcactttgagaggctgaggtggggggattccttagagtccaggagtttgagaccgacctgagccacatagcaagactcccatctcaatttaaaaaaatattaaaaactaaataaaaatgtaaaaaaataaaatatcaaggcaaactttttaaatggaagaagaaaaagaagcagagagtttccataggcagctaaaaattctgccaaaaatcaaaccctccaagagcatgcatttaaactcgtgcatttaaatacgtgatatttaatgtggtaggcacaataccacactttgagagactttgactcggagctgtaatctcagacccagggaggagggatttgctgctttcagcctccccctcctgctttggtgccgacgtccatatgtggcatctcgggttggtttcccctggcacccagcatgtcccggcctcacccacccctctggccggcagtgagcagctggggtgacctcccagaaagaaaatgccagtgggtttggctaaagcagctggtcaggcaagccctgtggcttctggtcccctcaaaatgcccagagctgagaatttccagagcatcccatgctgttggcacccaaaaatcagggtggtcttccctctggggctggaggtgtggcacccatccctcatcagcaggtcgcaagatacatgttcctctgcctgcctcaaaaccaaagtcagaaatgaggctgagccctggtagatattcacctggaagctagtctgcccagatagggtgggcccatggtgcttacttactggaagcttccaggacactcacggagcacctgaggctaggttaagtgcctccccctgcaccatctcattcaacccccacaccaccaccctaagaagcaggtcccataatgacccccatttttcagatggagaaactgaggcttgaaccagcttgtgaccagtcaatggtaaaacgagactggaagccggtgctgcttgcctcaaagaacttcttttttttttttttaaagacagagtctcaccgagtctcactctgtcgcccaggctggagtgcagtggtgtgatctcagctcactgcgacctccgcccccggggcccatgcgatcctcccacctcagccttccaagtagctggggttacaggcacctgccaccatgcctggctaatttttgtattttttgtcgagacggggtttctccatgttgcccaggctggtctcgaactcctgagctcaagcagtctgccctcctcggcctcccaaagtgctggcattacaagcatgagccaccgcgtccagctggctgaactaatgtagatctccctctaactctccccctcttctgagtgtacttggtttgatcgtgaacatctgcatttgccactagactggccgctctgaggaggcaaaggctggctcccttcctatgccctgagcgccccagaacatgacacctagtaggcagtcaataaacgaactgcatagaccccgtctccactcttcccatgtaaggcttcgtgcattggacctctcctggtatctttgccccaaatccattgcaggataatggagagagggtgtccaggctatggatcattagcacatgccatgtttttttgtttttcttttaattcccctaaccatttttttttctttttttaaaaaatggagtttcactctgtcggccaggctggggtgcaatggcacgatctcagctcactgcaacctctgcctctcgggttcgagtgattctcctgcctcagcctcctaagtagctgggattacaggcgcccaccaccacgcctggctaattttcatatttttagtagagacagcgttttgctatgttagccaggctggtctcgaactcctgacctcaagcgatccacctacctcggcctcccaaagtgctgggattacaggtgtggggcctccacacccggcccccttaaccattgaaagcctttttttggtctccctgtaaaaagtgcttaagggacaggtagaagaaggggtggatgttgctcggaattgcttaaactaggtccaaaggacaaaccagcaccttcatcctaaatgttgatgcattcccctgatgcttccagaagctgccaagtgtggaagacaaaaatagcaactacggatgttcacagaagtatctgaaaagactctgggggaaaagaggggttgatggatagttttctccagcccatttctgtcacctaagacaggggagtatcctctgaaggctcaatctattctgtattcaaaaatcccatcagacatcaaataagcctcctaaggctgggcgcggtagctcacgcctgtaatcccagcactttgggaggccgaggccagtggattatctgaggtcaggagttcaagaccagcctggccaacatggtgaaaccccatctctactaaaaatccaaaacattaactgggcgtggtggcaggtgcccgtaatccgagccacgcgggaggctgaggcaggagaatcgcttgaacccgggaggcagaggttgcagtgagctgagatcgcaccattgcaatccagcctgggcgacgagagcaaaactccgtctcaaaaaataaataaataaataagtttcctaaagcctcagcaacaaggttaatgcaggcattgaaaagctagatgcgtcaacagcagtggccctgattcacaatggcagaaatgtgaaagcgaccaagtgcccgtagatggatgaatacacaggcaaaatgtgctccctccatacaatggaacatgattcagccttaaaaaggaaagaatttccgacacaggctaccacgtggatgaaccttgaggacaacatgctcagtgaaataagccaggcacaaaaggataaatcccgtctgattccactcacaggaggtccctacagtcatcacattcatagagacagaaaataggatggtaggtgccagggggctgggagagggagatggtggagtgagtgtttcatggggacagagtttcagtttgggaggatgagaaagtttgggagatggtggtggtgatggttgcaaaaccacgtgaacgtgcttaatgccactgaaaactgtggacttaaaatggttaagatggggccaggcgcggtggcactcacctgtaatcccagcactttgcgaggctgaggtgggtgtattgctcgaggccaggggtttgagaccatcctggccaacatggcaaagccccctctgtcctgaaaatacaaaacttagccgggcatggtggctggtgcctataagtcccagtcactcggaaggctgaggcaggagaatcatttgaatccaggaggcggaggttgcagtgagctgagatcacaccactgccccccagcctaggtggcagagcaagactccatctcaaaaaaaaaaaaagttaagatgaaaaatttattctatgtgtattttatcacaatacaagaaattgaagaggggaaagaaagctgaagctgagttgctctcaaagacaggggcaacagttcaaaaaacaatcattttttggccccctggggatactgctactaatggatggctgagatatataccacatgccaggaacccggtaccccgggaagtgttagtcgcaccttctccgggtaacaaaacccccagtactggaaaaacaagcccggttctttttattgttttgttttgtgttcatttttgtttttgttttcttttgtttttgagatagagtctcagtttgtcacccaggctggagctcagtggcatgaacagggctcagtgcagcttcgacctcctggacacaaaagcctggttcttaatagcaaagcaatttttaattcactcaaaacatcaggcacagccaggcacagccaggcacagtggccgatgcatgtaatcccagcactttgggaagccgaggtgcttgagctcagaaatttgagaccagcctgaccaacatggccaaaccctgtctctacaacatacacaaaacttagctaggtgttggccaggcacggtggctcacccctgtaatcccagcactttgggaggccaaggcgggcagatcacctgaggtcgggagttcgagaccagcctggccaacatggagaaatcccatctctactaaaaatacaaaattagctgggtgtggtggcgcatgcctgtaatcctagctactcgggaggctgaggcaggagaatcgcttgaagccaggaggcagaaattgcggtgagccaagatcatgccattgcactccagcctgggcaacaaaagcgaaactccatctcaaaaaaaaaaaaaaaaaagtagccggatgtggtgacacctgtaatcccagctacttgggaggctgaggcaggaaaattgcttgaacctaggaggtggaggttgcagtgagccgagattgtgccactgtactccagcctgggtgacagaacgagactctgtctcaaaaacaaacaaacaaacaaacaacagcaacaacaactgaacacccagcagggagcaggagactcaattgcagataacaccattctggatattttgtctaaaacagatacaaaaataaattcatagaggaatgtcttaaattatatctcaagataggtaggcctagagcttttcaaacaagcactacatttggaaaactcagtaatagaataaaagaatgttcactgtttcccctggtgtcccagctagaagcagctcacttgtttctaaacagagaggacatccttcccactcctccaaaaaatcatagcttttattctggtgtatgtcttgcataaatttggcacaaaccccagttctgtcttttattagctgtgtggctctgggcaagttaagtaacctctctggtcatagtttagcttctccttgcccctgacctacaatattctcaggatttttccacagtgcaataataacggtcccctctcccaccacccttcactaacccatcttcctttttcaactatcccactcccgatttccaaccatccaacatgtcccatggaaggactcatgctgggggctccaagggagtcctcacagacaattccaaggattctatttaggtctatttaaggactcactcactctgggtggcttccccagagcgttgggctcagataagaagatcctcctttctcccctcccttctatcttttgtgatacaaccctcaagccacccacttaacttcttcccacctccatcgcatgttccctagttcttcccagggaaatgtgaaaagaagtccatgaaacaacaaacaagtaatgtgtgaatgtggaattgcctccttgagcatgaaaacatgataaaactaccatgatcagaacagtcactaccatgatcagaacagtcaccgctctgtggcatggagaggcagatctatggacacaccagaaacagaccccaaagcaatggcaaagaggtagatttctataatcaacagctgtctgaggcccccagttagctatttgggagagaaacgaaacgcccgttgagtcacacacacaaacagatctcaagtagtgaggatgaatttttttagataataataattaaaatataggctgggcgcggtggctcacgcctgtaatcccaacactttgggaggccgaggtgggtggatcacctgagagttcgagaccagcctggtcaacgtagtgaaatctcgtctctactaacaatacaaaaattagctgggcttggtggtgggtgcctgtaatcccagctacttgggaggctggggcaggagaaccgcttgaacccgggaggcagaggttgcagtgagccgagattgcaccatcgcactccagtcttaacaacaagagtgaaactccatctcaaaaaaaaaaaaaaaattaaaatataaaatgtagagaaaaaaaacctttcatgggtagaagaagactttctaagtgtaaagtacagaagtggcacactgaaatccagctctgaactccataaacattttaagcttctccagcaaaacacttcccagagcatttaaaccactgaacaacaaaaacaacaaaatgcaattggcaaagggttagtagccttcactgatgaaaaccacatacagattaattttgcaaaagctactgaggtactaaaagacaaatgggcaaaggatatgaacaggaagagaaaactcaaatgataaataaacatgttttaaaaggttcaaccccgatagcaatcaaagaaatgcaaatagaaacaatgacaacacgtcagctcctccctcccgcagtaaattatgaaagatttttcaaataacactcaaagctggccaaggtgttccctctcctccaaagctaggaggagtggccgttggcacaacatttccggaacaccatttgtcaatctgcaccaagagcctctgacccagaaattgcacttctggaaagcaagcctaaagaaacaactgctagataaagctttgactctaaaatgttcatcactctctttgtgaaaactagaaattatctttttttttttttttttttgagaaggagtttccctctggttgcccagggtggagtgcaatggcacaatctcggctcactgcaacctccgcctcccgggttcaagtgattctcctgcctcagcctcccaagtagctgggactacaggcgtgcaccgccacgcccggctaattttgtatttttagtagagatggggtttcaccgtgttggtcaggttggtctcgaactcctgacctcaagtggtccacccgcctcagcctccccaagtgctgggattacaggcctgagccaccgtgcccggcctggaaatcatcttaatgcccaataacaggaatggttaaggaaaccttcagtagacacgacagattcctgaagatcactagaaggaacaacccccaataaactactctcggcgacatgcgttgtggaataagatgaatgttttgcttttttttcgtttacaagtgtctttttccaaatgtctattataagcaatatcacttctataatcagataagaactaaactatttttttaaaaaaaccgaatctacagttttccactccttttcctctcccaagcaagaagaacattcactgactagcacaggcggtggcaaactgctgccctcgagcaaaatccggcccacgacttgtttttgtaaataaagttttattgaaacacagccacagtcatacatttatgcatgcctgtggctgcttgtccaatacagtggcagaattgagtcgttgcatcagagaccatatggcctgcaaaatctgaagtatctactatctgagtctttacagaaaatgtctgccactccctgggctagtgaatgccaccacccactattccccggcccctacctaatgaccatttaacatttttaagccataaaacattttaagctttctagaacaaggcacgagacactgcttagaaccctgtatccccggcgtacctttctggcagtgactatgagtccaacatcgttcgacaaactgcccgttgatgacggtggcggggcagttggtcttgcccttcgcggtacccggacagatgtctccacactcctcgttgtcatctttgttcaacacgatgtaattatcctccacggaatccaggatacgggaccagtcgatagtggccaagtaacagagctcattgttcttctcgatgcggacagaaccccgggtgatgttcatcaggttgtagaggccgagttccttgaggtgaaccatctcgaagatgaccagcgcgtagttaaagaacagtcgtgatccccggatgaccgtgaggttggggaacaggtccttcaggctctcgagcccatagacccggaagagcagcaagtaatcagtgatcatgatgagtttggggaaactgaggtctcggaaatcttcgggcctcgttttgaacatcaagagtatctgcaagtgtccttcgatgacagagcaattctccagctcatgcaacctagtgaggttgttccggatatccatgccgggacacactacaagagaaaatgaacagaaagcaagacaggtgagcagacgcacggtggatgcatcagaaggatcaggggcagagccggcttcatggacaggaaacctgggccctgtgttttcatcccgggccctgtaaactctgcagccagccgggatgagtagctttctctgtaaagtacccatgcctaagtaattactttcaaaacgccaagaaaataattcttttggcaagccctgttaaaatccttaaaatcaccacctctgaaatgatgcagtcgggacaatgggattacaggggattgagtaacgcggcaggtgcagaaggagaaaggggaactgtctccagtgcgtcaacatagaagatcttcaggagataatttacggggataaaggtgcccgcggtcagaaatggggcaaggaaagctaaatgtatttgttttgtcaatcctcccacctcgctggctgactttccttcccggactgctctcctgacctgcaatcaagacctaattaccttttacctgggtgtggtgagggcttcccagggagcccgatctccattgcccaaatgccctgagttctcattctcctgaaggcggtccctcccaggccccaacgcccaccatggctccccatcatcctgcacttccctcaagattctgcccctacatcccctgcacaccactaaacaggcctgcccacaactcttgcacaactccaagactcctatcctcctctgtaacatggcttatatggaagaagaagtgaaacaactcagggcaagcactcaaacagtgcctgagacatagtaagtgctgcactaatgtcagctattttgttgtttgttgttgttgttcttcttgctgttgtttattcccccaaacatataacagtcatctctaggctagtctatcttttggctggcgaagtgctttgtaccttagctccctatttctaaatccagcccatcatgcttcaagatatccagttcaaatgctgcctcctcctccaggcagccgtccctgatttcctttccttggcacacctatttgcgtgtttctcctccttgtgtcccttacacctgagttaacgtttttcaaaattgaagtctttagatggcttctctctgccaacacacccacacacccacacacacacacacacacacaccgcctccccaacacacacaccacagtcctcagcacctagaatataaggctcagtatacaacccctgcttattttgttccaaaacactaaaccttccaccaatatctttgaggaaaacagattgttctaaagaagaatagtaaatcctctaaaaaaaaaaaaaatccaccctgagaattacccacaaaagaagcacaaattagaaaaaacaataacaacgacaaaacacagcaaaagcaaacaaatgggaaaaaaaaagtagcagtgatcctggatcacattccatgcagcaaatggattaggctaagtcgagaaaacacacacacacacacacacacacacacacacacacacacacacacacacttgcttgctaggaagttggaggaaagccccagtacacaactatggattaatctccaccctcccctcaacactggctgcctggggtctgaaccaagcaggaaccctgcagggaccaagctcaggctgggaggcagcttcaagaggacaaggatgccagtcccagcccccccacccctcctagtcagggacccaaccccagtctgaggctcccagtcagtcacatcaacagcttccacatccagagatgtcaaagaaccccgcgtgccattggtgcctcccagcaagttctgtccccatcccatagatgagaaaactgaagctccaagaggcaaagaccatcactcaaggacacacaactcaccagtgactggcagggttgccagacttagcaaagaaaaatgcagaatgcctagttgaatttgaatttcagataagcaataatacctttttgaggataagtatatcccatgtaatgtttgggacataacttaccctaaaaaaaattactcattgtttctatgaaattcttgtggggtttttgttgttgttgttttgatgtggagtctcgttctgttgcccaggctgaagtgcagtgccgtgatcttggctcactgcaacctccacctcctgggttcaagtgattttcctgcttcagcctcccaagaagtgtccaacaccacgcccagctaatttttgtatttttagtagagacgggatttcaccatgttgaccaggatgatcctgatctcctgacctcgtgatccacccgcctcagcctcccaaattgctgggattacgggcataaaccaccatgcctggctggcatcctaatcttagatttggccatagccctgggcttctcaaccctgagtcccacactatatttcatttctctctctctctctctctctctcacacacacacacacacacacacacacacacacacacacactgcaggtagaaagaacacttggccgccatcctccccaggctatggcagaaccaaaatcagacatgaatatgcattcaaaggttaactagggctgggcacagtggctcatgcctgtaatcccagcagtttgggaggccacagtgagaggatcgattgaagccaggagtttaaagtcagcctgggcaacatagcaagaccccaactctaaaaaataataataataattaaatatccaggcatggtggcatgtggttgtaattccagctacttgggaggctgagacaggaggatcacttgggtccaggaataggaggttacagtgagctgtgatcacaccactgcactccagcttgggcaacagagtgagacctcgtctcgattaaaaaaacacaacggctgggcgtggtggccagctcatggctgtaatcccagcactttgggaggccaagatgggctgatcacgaggtcaggagatcaaaaccatcctggttaacacggtgaaactccgtctctactaaaaaatacaaaaaaattagccaggcgtggtggcgggcacccgtagtggcaactatttgggaggccgaggcaggagaatggcatgaacccgggaggcggagcttgcagtgagccgagatcacaccactgcactccagcctgggcgatggagcaagactctgtctcaaaaaaaaaacagaaaaaaaggaaagattaactggctgttggacattagagaaatacaaattcaaaccacagtgagataccactttatccccactaggatagctaaaaccaaaaagagtgacaattacaagtgcaaagaatgtaaagaaatgggccgggcaccgtggctcacacttgtaatcccagttctttgggaagccaagataggcagatcacctgaggtcaggagttcaagaccagcctggccaacacggagaaaccccgtctctactaaaaatacaaaaaacaactagctgggcgtggtggcaggcgcatgtagttccagacacttgggagtctgaggcaggagaatcacttgaacctgggaggtggaggttgcagtgagccaagatcactgcactccagcctgggcgacagagcgagactccatctcaaagaaaaaataaaatgtagagaaactggtatccttttgcattcctgatggggatgtaaaacagtgcagccactgtggaaaacactctggtagttcctcaaaatattaaaccaagaattgccatatgacctggcaattccactcctaggtaactacctaagagaaatgatactatacgtccacacaaagacgtgtacacaaatgtctatagcagcattattcataatagctgaggctgagtgcagtggctcacgcctgtaatcccagcactttgggaggtagagacggaaggattgcttaaacccaagagttcaagaccaacctgggcaacatagcgagtctccatctctataaaaatttaaaacattagctaggaatgctggtgtgtgtctctggtcccagctacacgggagactgaggcaggaggatcgcttgagcctaggaggtcaggactgcagtgatctgtgtttgtacccctgcactccagcctgggcaacagagcaatatcttgtctcaaaagtaaatacaggctggccgcagtggctcacgcctgtaatcccagcactgcgggaggccgaggtgggcggatcacgaggtcaggagattgagaccatcctggccaacatggtgaaaccccatctctactaaacatacaaaaaaaattagctgggcatggtggcgagtgcctgtagtcccagctacttgggaagctaaggcagaagagtcacttgaaccagagagttggaggtttcagtgagccaagattgcaccactgcactccagcctgatgaaagagtgagactccgtctctaaataaataaataaataaatgtaaataaaaggccagccacagtggctcactcctttaatcccagcgctttgggaggctgaggcaggtggatcacctgaggtcgggagttggagaccagcttggccaacgtggtgaaaacctgtctctactaaaaatacaaaaattagctgggcggggtggcgcatgcctgtaatcccagctgctacggaggctgaggcaggagaatggcttgaacctaggaggcggacgttgcagtgagctgagatcgtgcctttgcactccagcctgggtgacagagcaaaactccatctcaaaaaacaaaaaacaaaaccaaaaaaaccccacgaaacaaaaacaaaaacaaacaaacaaacaaaaacaaaacaaaattatgcctccagtatagctggaaccacagacatgcaccaccatgcccagctaatttaaatttgttttgtagagatagtggtctctctatgttgcccaggatgctctcaaactcctgaactcaagcaatcctccagtcttggcctcccaaagtgctgggattacaggtatgaaccttctccataaaagaagtcaaacagagaaggccacatgttgtctgactccattcatacaaaaaaatccgaaagaggcaaatccatagagacagaaaatagattcgtggctgccaagagctagggaaatgggggatggaaagtagtagctagagggtacagggtttctttgaagatgatgcaaatattctaaaactgactgtggtcacagttgcacaactgtaaatgtcctcaaaaccacctaactgcacacttaaaatgggtgaattgtatgtcatgtgaattctgtctcactaaagttgttatgagtaaagattaaacagctataattgtagggaacaatcaagaattgcttttctttttaaatatcctatgaatctaactcttaattcattaaagccgtatgtgtccctattagtgaaagacaatagagcagtttaccactgggacagaaaatacccagaggatgttagaaatgaaggcagaaatagacacgaggacttctgctggcttttaacatctctgagtgggcgtgaaggatgcttcaagttcttcataatgggtacctggttaatggccactctttgtacaggtagaaaaaggcaatgaggaagagggtgctaagtgacagctaatattttcttttttctttttttttttttctttaattgagacttgagtcttactctgttgcccaggctggagtgcagtggcatgatcttggcttgctgcaaactccacttctggggttcaagcaattctcctgcctcagcctcccgagtagctgggattacaggcgtgtgccaccacacctggctaattttgtatttttagtagagatgggatttcatcatgttggccaggctggtctcgaactctgacctcaggtgatccgcccacctcggcctcccaaagtgctgggattacaggcgtgagccaccgtgcctgaccaccatctccgtactaaaatatgccgaatgggccaggtaccatggctcacacctgtaatcccagctactcaggaggctgaggcaggagaatcgcttgaacccaggagatggaagttgcagtgaactgagatcatcccgtcgcactccagcctaagtaacaaagcaagactccatctcaaaataaataaataaataaataattcccacatataatcaatcctaaaaaaaaaatgattaatgagatagtccacagcagtggtccccaacctttttggcaccagggaccaatggtagaagacaatttttccacgaacacgggatgggtggtgatggttttagaatgaaactgttccacctcagatcctcaggcatcagttagattctcataaggagcaggcaacctagatcccttgtatgcacagttcacgacaggattcgagctcctatcagaatctaatgctgccattgttctgacacgaggcggagctcaggcggcaatgctcacctgccctctgctcacctctactgtgcagcccagctcctaacaggacatggactgctactggtctgtggcctaagggttggggatccctggtctgcaggatttttttcccatgacgcctacgagatgtggtgtgtgctttaccctggcagcccatctcgaaacggaggctcatttttctttaaaaataattgatttgtcgcccaggcgtggtggctcacgcctgtaatcccagcactttgggaggccgagtcgggtggatcacgaggtcaggagatcaagaccatcctggctaaccatgtgaaaccccgtctctactaaaaatacaaaaaaaaaatagctgggcatggtggcaggtgcctgtagtcccagctacactcgggaggctgaggcaggagaatggcgtgaacccaggaggcggagcttgcagtgagccaagatcaggccactgcactccagcctgggcaacagagtgagactgtgtctcaaaaaaaaaaaaaaaaaattgatttgtctatgtagattttataaagagtatcatcgaaaatgtaggtttgatgtagaagaggcaagccccaaaattgagccttaccccgggagggtttttggcttcacccaggaaagaattcgagggtgagctggtggtgttagacagcactttttttttttttggtcagagagggagtttcactctgttgcccaggctggaatgcaatgacatgatctcggctcactgcaacctctgccgcctgggttcaagtgattctcctgcctcagcctcccgagtagttggtattacaggcatgcactaccacatccagataattttgtatttttagtagagacaaggtttcaccatgttggccaggctggtctcgaactcctgacctcaggtgatccacctgccttggcctcccaaagtgctgggattacaggcgtgagccactgcgcccggccagccctgtccttgtggctagtcctccatttggtccagggctggatccccgcctctggagacgagtcccgcctactacctcaagttcacataaccaagttgttccaaatatatgggagagttttccagtaacagaactgagtactaattttttttacatttccatgaattaaataaaagtttacattgacatttcaatgaattaaagtgaaaataaaattcagtttcagccaggtgcggtggctcacgcctgtaatcccagcactttgggaggccaaggcgggtggatgacccaaggtcaggagtttgagatcagcctggataacatggtgaaaccccgtctctactaaaaatacaaaacttagcggggtcgggggagtggcgcatgcctgtaatcccagctactagggaggctgaggcaggagaatcgcttgaacctgggaggcagaggttgcagtgagccgagattgtgccattacactccagcctggatgacagagcgagactccatctcaaaaaaaaaaaaaaagaattcagtcttaccagccacaacttccagggctcaagagccacccgtggatggtggctgccatattggacagagcagatacagagtatttccatcaaagcagagctgtattggaccgtgctggtcctgaatctgagaattttccagaaggagagaaggcggacatgagagccatcttaggaagtgttcctttcttccctgattttctctccatcatgaaaacagcaggggagatgggttgggagcagggcagagaaagaactttctagaagattctgaaatcctttacaatgctaagagttttctacttcctgttttcaatcataaaggtccttgttcttcagttacaggattttttttttgagacagagtcttgctatgttgcccaggctggagtgcagtggtgcaatcatagctcactgcagcctcaaattcctgggctcaagtgatcctcctgcctcagcctcccaagtagctgggactacagctgcgtaccaccatgcctggctaatttttgtattttttgtagagatggggtttcaccatgttgcccaggctggtctcaatatcctgggctcaagcagtcctgcgtcggcctcccagtgtgctgggagtatgggtgtgagccatcaagcccggccagtaacagcattcttaaaatgctccctgctgacctattctggggcccacacgtccctttccacattctttccagtcctcaaactgcttcctcttaaattcaggaggtcctgcctcaacaagtcttgggttctggtgtcaggccaccacctataccagttttggggcacactagaaatctaacgaatctggcttcccaacccagctctgtcacctgtcaactgtgtgatcctggacaacatcttcaacccctctgcacgccttagtttcctttttatttatttattcatttatttatttttatttttgagacggagtctcactctgtctcccaggctggagtgcagtagcgtgatctcgaatcactgcaacctccatctcccgggttcaagcgattctcctgcctcagccttttgagtagctgagattacaggcgcccgccaccacgcacagctaatttttgtatttttagtagagacagggttttgccaagttggccaggctagtctcaaactcgtgacctcaggtgatccacccgtctagacctcccaaagtgctgggattacaggtgtgagccaccgtgcctggcctcagtttcctttaaatgatgacaacagcataatgaaacctacaaagaagagatgagaactggggtctctggctgtgtatacctgttctgtctcccatctgagccagatggaatccattcccagatttattacctccagaaattagagcttggacacactggggtgtcagagatccttaagattctccacctgcctgcaagaatagctttcaaatctacctctgcgagaaggaatggaggcgtctggatcaaatgcaggttctggacccggcaagtcagctacatggaaatcattcctgtattcactcagcaaacgtttgctgggcatctcggtgggccagacattgtgccaggcccagggggactctcaagacaaataaggttgcactcttacagcaagtaaaggaaagacgcacctaaataactgtgataagctaccaccagagctaaaggacaaagtactaaaacaaagaactgcagagatgttggccgggtgcagtggtcatgcctgtaatcccaacatattgggaggcataggcgggtggactgcttgagtccgggagttcaagaccagcctgggcaactggcaaaaccctacctctactaaaaatacaaaacatagccaggcgtggtgaggcgcgtctgtgctcccggctactcaggaggcttaggcaggagaattgcttgagcccaagaggttgaggctgcagtgagctatgactgcaccactgcactccagcctgggtgacagagtgagacactatttctaaaaaaaaccaaggccggacacggtggctcacgcctgtaatcccagcacttcaggaggcccaggcgggcagatcacttgaggtcaggagttcgagaccagccaggccaacatggtgaaaccccgtctctactaaaaatacaaaaaaattagccgggcacggtagcgctcgcctgtaatcccagctactcaggaggctgaggcaggagaaacacttgaacctgggaggcagaggttgcattgagccaagactgtgccactacactccagcctgggtgacagagtgagactcggtctcaaaaaaattaaaaaataaattaaaaaataaaaaataaaacaacaacaaaaagaaatgagaacagaagaatgcagatggaaacagtgaaccagtgaagacaaaggatgaaggaagaaaacaagtgtaatctgtaggacagaactgaaagaggactgtgatgaaaccctcatcatccagatcatagtccttccagaaacttatcatgtcattagtctcagaagatgtaccgaggacatctttggaacaaaccaagaagccagcaaggaggaagtcagtgaaagccctgggacctaaaagcaaagatgccccctcaggattcttcctccttgggagagaaaggcagatacccaactctggacattcataaggcagcaatttcaaaaggccggagaagaccaacaatttccagggatcatggacccaccagggaggatgagcttgagaaaacaggataccacagggtaaccaaaagagagccacacaggctgggcacagtggctcacgcctgtaatcccagcactttgggaggtcaaggggggtggatcacctgaggtcaggagtttgagaccagcctggccaacatggtgaaaccccatgtctactaaaaatatgaaaattagcctggtgtggtggcgtgtgcctgtaatcccagcactttgggaggctgaggtgggaggatcacctgaggtcaggagtttgagaccagcctggccaacaaagtgaaaccccatgtctactaaaaatacaaaaatgagtccggtatggtggcgtatgcctgtaatcgcagcactttgggagcctgaggtgggaggatcacctgaggtcaggagttcaagaccagcctggccaacatggggaaacctcatctctactaaaaatacaaaaattagccagggatggtggtgcacacctgtaatcccagctactcaggaagctgaagcaggacaatctcttaaacccaggagggagaggttgagtgagctgagatcacgccactgcactctagcctgggtgacagagtgacactccatctcaaaaaaagaaaagaaataaaataaaataaaataaaataaatatccctctagacagggcacagtggctcacatctataatcccagcccttggggaggctgacgcaggaggatcacttaagtccagaagtctgagaccaatctgggcaacacagtaagaccccatgtctataaaaataaaattaaaaaataaaaaagaaagagagaaacagccttctggcagcagaatgaagaaggtactgaagacagcatgcatagcaccacagaaaccaggggcagtttgtgtgaacaggacttcatacccaggagaaatggaagagaagagggagaagagagtgaggagggatcgtcaatgagcctgaagcattcgagataggaacagtttagagtggcaagaacaacaggctgagttggcagcatattgagtctgtgagggctttgggatactcagggatgtgggtcccgtgggcattgggaagatgggggaacaggtacggatgctggtggacgcagtgacaacaggtgatattgcaggaaaggtagcacggagacaactgagagaagaaaatgatagaaagagaggctcacgcctggaatcccagcactttgtgaggctgaggtgggtggactgcttgagcccaggagtttgagattggcctgggtaacatagcaaaaccccatctctaccaaaaaaaaaaaaattggatgggtgtggtggtgtgcacctgtagtcccagctactcgggaggttgaggattgctcgagcctgggaggtggagattgcggaggcctgacatcacaccactacactccagcctaggcgacagtgcgaggagaccctgtctcaaaaacaaaacaaggccaggcacggtggctcacacctgtaatcccagcactttgggaggccgaggcgggcggatcacgaggtcaagagattgagaccatcctggctaacaaggtgaaactccgtctctactaaaaatacaaaaattagccgggcgtggtggcaggcgcctgtagtcccagctactcgggaggctgaggcaggagaatggcgtgaacccgggaggcggagcttgcagtgagtcgagactgcgccactgcactccagcctgggcaacagagcgagactccgtctcataacaaaaaacaaaaaaacaaaacaaaacaaaggctgggtgcggttgctcacgcctgtaattccagcactttgggaggccaaggcaggtggatcacttgaggtcaggagttcgagcccagcctggccaaagtttgagacccgtctctaccaaaaatataaaaaattagccaggccgggcatggtagctcacacctgtaatcccagcactttgggcagccgaggcgggtggatcacctgagatcaggagttcgagaccagcctaaccaacatggagaaaccccatctctactaagaatacaaaattagctgggcatggtggcgtatgcctgtagtcccagctacttgggaggctgaggcaggagaatcgcctgaacccgggaggcggaggttgtgatgagccgatatcatgccattgcactccagcctgggcaacaagagcgaaactccatctcaaaaaaaaaaacaaaaaacccaaaaattagtcaggtattgtggtgcacacttataatcccagctactcaggaggctgaggcaggagaatcgcttgaacctggaaggcagaggttgcaatcagccaagatcgtgccactgcactgcactccagcctgggtgacagagcgagactcgatctccaaaaaaaaagaaaaaagaaagaaagaggggctccagggggcacagtatgaaaggccagggactaggaagggcacctgtgtcccacagccacccggacaccaacaccttctgtgaactctggaatgtctgactcctctagtctatgacatagttttgtaatcctaacaatatcaaacatcaaaccacaggattagaagggggcttccgtgctatttcaggagtcctgaaatttatacagacaagagcagacaggacacagaagacaggaggaaaaacaagagaagtcctgccagaccagaaagtcactttgtaacaggtggtatggagaccgtgtaactgggtataattaggagggaacatatgaggtcctcccttttctgatcttctgcaaggaaacaacaagatacatccttgagagtagaatgacaacaacaaacaaacacacacacacacacacagacacatacacaggcagtcagaaaacagttgtatcccaccaggcacagtggctcacatctgcaatcccagtgctttgggaggctgaggcgggacgatcacttaaggtcttgagttcgaggccagcctgggcaacacagccagaccctgtctctgcaaaaaataaaaataaaaaaactagccaggcatggtggtgcatgcctgtagtcccagctacttgggaggaggaagcgcgagaatcatttgagcccaggagttcagggctgcaatgagccataatcacaccaccgcactccagccgggatgacagagcaagaccctgtctctaatgataagaataaatgagattttaaaatcaatttaaaaaagcagttgcatccctactctcgagtcccttcctgtctgactacttttgcctgcattgataaaaagggtaatttttagacagtacctatggtttccacattcccacaaaggcaaaggaaataagaatctcatgatagcatcctgcctttcctgaacatacatcaggggcttttatataaacctgatgagatatcctacttctaaggaactggaagaaaatgccagatgtgaaattaaacattcattcccacaagtccgctttgaactccaacaggagcttagagccagtctgtacgtggcaccgcaggatagcaaagcttgttctgctggaaacaaaatatgtttctaaaaccccgcgagccggcggggcacggtggctcacaccagtaatcccagcactttgggaggccgaggtgggtggatcatttgaggtcaggggttcaagaccagcctggccaacatggtgaaaccctgtctctactaaaaatacaaaaattagctgggcgtggtggtgtacgcctgtaatcccagctactcgggaggctgaggcaggagaattgcttgaacccaggaggcagaggttgcagtgagccgagatcgtgccactacactccagcctgggcaacagagtgcgactccatctcaaaataatagtaataataataataatccttcaagccagctggacaaggtggctcacaccagtaatcccagccctttgagaggctgaggcaggtgggtggcttgaggtcaggagtttgagacccacctgggcaacatggggaaaccccatctctactaaaatgcaaaaattagctgggcgtggtggcacatgcctgtagtcccagctactcaggaggctgaggcaggagaattgcttaaaccctggaggcggaggttgcagtgagctgagatcgtgacactgcattccagcctgggcaacggagtaagactgctcaaaataataataataataggcaacatggccaggcgcagtggctcacgcctgtaatcccagcactttgggaggccgaggtgggggatcacgaggtcaggagatcgagaccacggtgaaaccccgtctctactaaaaatacaaaaaattagccgggggcagtggcgggcgcctgtagtccctgctactcaggaggctgaggcaggagaatggcatgaacccggaaggcgaagcttgcagtaagctgagatcacgccactgcactccagcctgggcgacagagtgagactccgcctcaaaaaaagtaataataataataataataataggcaacatggtgagaccccatctctactaaaatacaaaaattagctagtcgtggtagcacacgcctgtagtgccagctactcaggaggctgaggtgggaggaccacttgagcccaggaggtcgaggctgcagtgagctgtgattgcgccactgcactccagcctgagcaacagtgcaagaccctttctcaaaaaaatgtaaatgaataaatgaaataaataaaatcccgagagccactgctgcctctccctgccaccagtgttggcagagggcagggattcccctccctgaaacatgggccaggggtttttggacatctcatgaactttccaaaaggtatcaacccagcggtttccacgcagatgaaaatacaacaaaaagggcatttgcattcaaaggattctaaacggaaaatgacaaacccacagttttgtttggtttggtttggtttttttagatggggtcttgctctgttgccctggctggaatgcagtggtgcagtctcggctcactgcaacctctgcctcccgggttccagcaattctcccgcctcagcctcctgagtagctgggactacaggcatgagccaccgtgctcggctaatttttgtatttttagtagagacggggtttcaccattttggccaggctggtctcgaactcaccacctcaggtgatccacctgcctcggcctcccaaagtgctgggattacgggtatgagccacagattcaccagttttaaaccacttgcagccgattcttgttattggtggtagtttggctctgtgaaattcccctgaatgttgaactagtgaatactgaaccattgttcctaggaaaatgcgagggtaagtacctgcgaacttctggccacaacacatttatccatggatcaatacctagccttgttttatgtgtgtttctgttgaaagacactattgaatctatattgttgattcattaacaccgaactcacggccaacagtaatagaactcatgcctgaacaaagtttatgtaacacatgcctttgtgtgtgtgtgttggttttggagtttttttgtttttttgggttttttttgagacagggtctcactctgttgcccaggctggagtgcagtggcaccgccttggctcactgcaaccttcacctcctaggctcgagcaattcttgtgccttagcctcccaggtagctgagattacaggtgtgcgccatcacgcccagctaatttttgtatttttagtagagatggggtttcaccatgttgcccaggctggtctcaaactctggcctcaagtgatccacctgcctcaacctcccaaagtgctgggattgcagatgtgagccaccgtgccccgccacgctgccttttctccacaagggtggtgacagccctccttagccaaggaagagtagagagcagggcttcagcaccctggggggcatttgaaacagccccatcaccaactgaaagcacaaaaatgctaaaaatgtggcaccaaataaccacaaaaaggactcaggtttttttgttgttgttttttgttttgagtctcaccctgtcacccaggctggagtgcagaggcacaatctcggctcactgcaacctccacctcctgggtccaagtgattctcctgcctcagcctccggagtagctcggactacaggcgcccgccaccacacctggctaattttttgtatttttagtagagacagggtttcaccatgttagccaggatggtctcgatctcctgacctcgtgatccactcgcctcggactcccaaagcgctgggcatgagccactgcgcctgctcaaaaaggactagttttaatcctcagtgtgcagattgtatgaatctgacgcataagggctgaagcaagaaggtggaatgccctcttacttgacctcacatttgagactcgtacttatgagtgtcctaaaatgaccagaaaggcactgagcatgctggtttgagggttacaaatacatttgagtgagtaggtgaattcaaaaatacagggtctggggccaggtgcagtggctcatgcctgtaatcccagtactttaggaagtcaagatgggaggatcacttgaggccaggagttcgagaccagcctgggcaacatagcgagcccttatccctgctgaaaagttaaaaattaggccgggcacagtggctcgcgcctgtaatcccagcactttgggaggctgaagtgggcggatcacttgaagccaggagtttgagaccagcctgaccaacatggtaaaaccccatctctactaaaaataaaaaaaactagccgggcatggtggcgtgcctgtaaccccagctactagaaaggctgaggcaggagagttgcttgagcccaggaagcagaggttgcagtgaacccagatcacaccactgcagtctggcctgggcaacagagttagtgagactccgtctcaaaaataaataaataaataaataacaataaaaactagctgagcatggtggtgtgtgcctgtagtcccagctactcaggaggctgaggcaggaggatcgttgatgctcaagagttggaggctgcagggaattaggaccacaccactgcactccagcctgggtatcagagcaagaacctgcctctcaaaataaaaatttaaattttaaattttaaaaagaaaatatgggatctgggaatgatgaggatcaaccagactcaaatttaaaatttcaactttaggaatattaatccaattataagataaaatcttttaaagtctagagaaaactatagggatggagaacagatctgtggttaggggtggaggtggtttagtgataaaggggtgaattgagggagtttggacaacaacgagactgttctctatcctaattgtggcaatagccatacaactctacacatggcttaaaaatcataaaatggtacacctttaaaaagccaattttactgtatgataatgtttaaaatattttgttgttgttgttgttacacagtctcactatgtcacccaggctggatgcagtggtgcaatcacagctcactggcgcctcgacttcccaggctcaggtgatcctcccacctcagcctccctagtagctgggaccacaggtgctcaccactgtatctggataatttttttgtagggttttgtagagacggggtcttgctatgttacccaggctggtcttgaactcctgggctcaagagatccacctgcttcggcctcccaaagtgctgggattacaggagtggccccatgacacctagcctaaaaaattactaaacatcaaaaagatacataaaccaatggcacagttacctccctggacatgaatggaatgcttttggggacagggggacaagatttttttttattatttcttttctttttgagacagggtcgggctctatcacccaggttggagtgcagtggcatgaatatggcttactgtagcctcaaccttctgggctcaagcgatcctcccacctcagcctcctgagtagctgggactaccggtacacaccaccatgctcagctaatttttaaactttttctagagataatgtctcattatgttgcccaggctggtctcaaactgctggcttcaagtgttcctcccacctcagcttcctaaaaagtccagggattacaggtgtgagccactgcaccccaccacaagattttgcagaaggacttctgtgttttttttttcctttctacacttttgtaatttttctttttgcaatgagaatgcattacccgtcactatttaattaaaaactgtaaataccatgcagctgcaaaatatcaaccaggccaccccaagaagtattctttttttgtttgagacagagagaggatctcactgttgcccaggctggagtgcagtggtacaatcacagctcactgcagccttgcccttccagcctcaagaggtcctcccatctcagcctcccaagtagctgggactacagacacatgccaccatgcccagctaatttttgttttattgttagtggagacagggtcttgctgtgttgtccaggctgatctgaaactcctggacacatgtaatcctcccacctcagcctcccagagtgctgggattgcaggcatgagccactgcacctggccaaaaatattcttttttttttttttttttgagatggagtttcgctctgtcacccaggctagagtgcagtggcgcaatctcggctcactgcaacctccacctcccaggttcaagcgattctcctgcctcagcctcccaactagctgggattacaggcatgcgccaccacgcctggctaattttgtattttttcagtaaagatggggtttcaccatgttggtcaggctggtctcgaactcctgacctcaagtgatccacccacctcggcctcccaaagtgcttgggattacaggcgtgagccaccacacctggcccagaagtattcttaacagaaattaacacaagagaggcctgagagaaaaaaaaaaaatctcattatatacaccagttatattttgggttctagatacagggttgagagcatgaaatcctcattcaatgccaatatagctgtttaaataaatacacatggctaagtaggcaacatcacggtgatttttctcatccttggaatccgtatattcagtgcagcaaatgacacacgtttctttaacatctcttgcggtgtaaagagaaagacatagcgtttcatttcactcacttcattcgagttgtaccagggactgcacaagctattaggcatgctatcatgaatgaaacctcaaggcgtctgttccagatcagaggtcagcaaacgctgttctgtaaagggccaaagtgtaaatattttggccatggaattcctgttttaactactcaacctgccgtgtcggggcatttttgcgcagtcatagatgatgagtagacaaatgagtgtggttgcatgccaataaaactgcatttacaaaaaccgtgggatttggcctgagggccatagtttgctgacccctgttcagatgaagaagtcggaatctatgtaaatttcttagctgggcgcaatggttcctcatgcctataatcccagcacttgggaggcccaggagggaagactgcttgaactaggagttcaagaccagcctaggcaacatagcaagaccctgtttctacaaaaaaaaaaaaaaagttttaattagccaggcatggtggtgactgtctgtgagcccaggtacccaggaggcggaggcaagcaggttgcttgaggccaggaattcaagaccagcatgggcaacatagctagactctgtctctacaaataaattttaaaaattagctagtcatggtggtgcctgcctgtgatcctagtttctcagaaggccaaggcaggaggctcacttgaggccaggaaatcaagaccagcctgggcaacatagtgagactctgtctctacaaacaaatttttcaattagctgggcatggtggcacctgcctgtgattccagctacttggggaacctaggtgggaggactgctccaggccatgacttggaggctgcagtaagctaggactaaacctctgcactccagcctgggtgacagagcaaaatcctgtctctaaaaagaaataaaaattggaaaaaaaaaaaaaaaaaaaaagggccggacacggtggctcatgcccgtaatcccagcactctgggaggctgaggtaggtggatctcttgaggtcaggagtttgggaccagcctggccaatggggtgaaactctgtctctactaaaagtacaaaaactagccaggcggggtggcacatgcctgtaattccagctactggagaggctgaggcaggaccattgcttgaacccaggagacggaggttgtagtgagccaagatcatgccattgcacaccagcccgggtgaagaagtgaaaaaaaaaaaaaaaaaaaagtgagctgagagaagattaaaggaaacactgaccctctgggaagagagagccaacatcttagcccaggtagaaggagaagagaacagtaaaacagaagaacttaggcacaggtgagacgggagacacagccttccaggaggggggactggcaatgtcaaacccagaggggtcaagtgaggtgaggctgcaggagacgcaactgggagatgagagattaacttcgagagccatcggtaaagcagcggagatgcaagccagatgctgggggcagaacagtgagaaaagagtgagatggaaagggcagggaggactggcctggggaagctggacagggtggaggctggaggtcagtggtaggtaatggggattggggggtactgggtgtttagaggctgaaaaagcacgtgggtaaatgaagattcttttttcttttcttttttttttttttttttgagacagagtctctctctgttgcccaggctagaatgcaatggtgtgatctcggctcactgcaagctctgcctcccaggttcaagcgattctcctgcctcagcctcccaagtagctaggattacaaggacccgccaccacacctggctaatttttgcatttttagtagagatggggtttcaccatgttggccagggtggtctcaaactcctgacctcaggggatccgcccacctcagcctcccaaggtgttgggattacaggcgtgagccactgcacccggccgaggattattgaacaaagagaggagaaagagcaagagcccagatgggtaaatgtctcagacagggaaaaggttaactcctgcagagacgtgcctggcaatgtctggagacattagtggttgtcatgcctggggggaaggggatcctcccaggaccacatgggtggagaccatggttccagctcaacactctacatacaggacagcccccaccaccaggaatgatccagccccaaatgtcagcagtgccaagattgagagttctgcttaaaccaaagaggaatggaagtcaagggtagagtggggtgaggtggggagccctggggactcagcccacaccctgtggtctctatgcatgaatggggaagggcaagaagcaggtctccaggagagaagcaaagaataagaataactgcagaggccagacaccgtggctcatgcctgtgatcccagcacttcgggaggccaaggcaggcagatcgcttgaggccaggagtttgagaccagcctggacaaaatagcaagacttcagctctacacattaaagtaaaaattagccaggcagggtggcgtgtgcctgtggtcccagctactacggaggctaaaataggaggatggcttgcgtccaggaggtcgaggctgcagtgagccatcattgcccaactgcactccagcctaagcaacagagcaagacctcatctcaaaaaataatagatagctagagagatagatacaaaaatcacactgattttcctccacccttcatcccaatcaaaatgccatattgggcccggagtgatggctcacacctataatcccaggtctttggaaggccgaggcaggcagatcacttgaggtcagaagtttgagaccagcctaaccaatatggcgaaatcccatctctactaaaaatacaaaaattagccaagggtggtgatacacgactgtaatcccagctactcaggaggctgaggcaggagatgcacttgaacctgaaaggcggaggtcgcaaagatcgtgtcactgcactccagcccgggtgacagagtgacaccctgtctcaaaaaaaaaaaagaaaaaaaaaaaggccaggtacggtggctcactcctgtaatcccaacactttgggaggccgaggcgggtggatcacaagatcaggaggtcgagaccatcctggctaacacagcaaagccctgtctctactaaaaatacaaaaaataagccggtgttgtggaacacgcctgtaatcccagctactggggaggctgaggcaggagaatcccttgaacctgggaggtggaggttgcagtgagctgagatcgtgccactgcactccagcctgggtgacagagcaagactccgtctcaaaaaaaaaaaagccatattggttgacattagagattaatgatctgaaaagttctttgcccctccccaagccttcaagaggcatcacagcccatttatttgacaggattttgttcaccatcaccccaatcgtggggggtacggaggctcggactcaaaagaacaaagatttgttaagaaaccattgctctgcagccacactagctagattgcaatcccagccctgctgcctgctggcctcaagcgaagttttctcacttgtgaaaagggaagattaaaccgcacctcgtggggttttgccgtgaggattaactgagattatatatgcaaagcgcatagaacagcacctgctgagagcttgctcttctaattcttaggaaggtattatgcagagaataaggaactccttaagatgataaaggagcccagtacacccaggaactccaccacttgtgccccactgcagaacaaatatttactgaacacctactatgtgccaggcatcgttctgggctctagaaatgcaacggtgaacaacaacaaaccataaacccctgcccatatggaagccataaatgtgcaaagaaatggtaaatccatttactgaccctgaaagcccaggcacagatccacaattaattaccaaagctacaaggaacagaagaacagggaaccacacacacgcacacatagaatctggcatagttcgaaaccactcatcttggattttctttttatttatttatttatttttgagacagagtctcgctctgtcgcccagtggcacgatcttggctcactgcaagctccgcctcccgggtttacgccattctcctgcctcagcctccggaatagctgggactacaggcgcccgccaccacgcccggctaattttttctatttttcagtagagacagggttttaccgtgttagccaggatggtcgtgatctcctgaactggtgatccacccgcctcggcctcccaaagtgctgggattacaagcgtgagccaccacgccccgcctttttttttatttttttgagacaaagtctcgctctttggccaggctggagtgcagtggtgccatctgagctcacagcaacctcctcctcccgggttcaagcaattgtcccgcctcagcctcccaagtagctgggactacaggcgaacgccaccaaacccaggtaatttttgtattttgagcagagaagggagtttcaccatgttggccaggatggtctccatctcctgacctcgtgatccgcccgcctcagcctcccaaaatgctgagattacaggcttgagccaccgcagctggccagattttcttaacaagaactccaactaaccgccacccttcattgagcacctactgtctcccaggcacctgggggcggggctgggggggggtgggcccggggcttttagacattatgtgattgacagagtcgactcagcaaacccggttggtccactctagcacctgattttacatgcacccgtttccccatcaatacatttaagagcttcaattccttccctccctgaccccttcctcatcacgactgatttccttttatggagaaatctgaaacagtaacccaacagatatttttaaagcagggcctcagaccccacagtgggaaacccaggctatattccttaaatgattgcgccatcttcatcttacaaccccaaaggtgcctattgtcaagcccaaggaagatgctgcccacacgtgggagaggggcccatggggtcagggggaacgaaaggctcactcaaggtcaaaggctccttcatgaagcgcagggctgaggggagaggaggggtcaaggagacagcagacaagggacagtagtccagattcttgggcagaacgggacacacagaggctcaagtcctggctctggcactgactttagggcaagggagttatgcgtcctacatgagcctcagtttactcctctgtgaaatgggtgcataactgtatctgcctccgggggccactgtgacagtccagagagataagatagactaggctgtggcgtgcggtgataccaattacaataaatagggtaaaaaaccgccactacttctgctacaattgctgctgttgctaaggctttagaatttgcctccggacatctggaaacagaacccaaaagggtaaacatggacctagagtccggggtggccacgggcctagatccaaggtagttgggtagaggggggctctgcagtccctgaccccaggcagcgtcacccaccggtgaggcactcagggcgcttggctctacctacaccatatgcgctcgggggacttggctgttcggggctgtccagacccagtgaccccacttcccggccgcgacccaaagatgacgcgtgtcgtgtctccggagcgacttgggctcggaggggccggggcacgggtcggaggcgcgctccagagaggagcccgcggcggggcgggcaccggggcaaggttcctcgggctcaggtcgggcacgcagggcgcggaggcgcgagcccgggcgggcaaaggccaaggtcagaggcttcccgctccccctacgcgatgcaggagctaccgtcctggccaccgccccccgcccctggggagggttctcagtccacaagcgggggctcgattttggcttgggtggggtcctctccccatcgcggcgctccccgcccacgcccgcgcccccagactcaccctctccggggtacaggtggcccgcggcgcccagtagcagcgcggccaccgccaccagcagcggcgcggccgccgccccccgccggcccccggtggccatggctgcgggagcgcggggtctcctcggatcagagcgcgcggcgctggcccgcgggggtcatgctccgaggcggccacccaagaggcgctgggggccgcgcgtccttctcttccacgcccgcgacccgcgggccgcagcccccctgccggggagggcccagaggcagccccgggaagggcgcgcgcggcttcgccagctacaaatactgagcggaggcccttgcggtggtggccccgaccccccggccgctgcggcccgggccccgtcccaggatctcggggcccggagctccgcgctgcgcccgggactgtctctcggctctcggccccgcgcgctctgggtcgcgatctgcgggctccgggacagagggacgcgcggaccgacggactagctgactggcgggcgggcacctgggctggcgggtggcgggcgggcggcgggagagagggctgctcgggcccgtaaacaacgcggcccgtcagctgggccccgtgcgggccgcgggaaaaggcggcgcggatctggcctaggaagggactctgcgcccgggagaggcccaggagagggagggaaagcttgcaggggagggaggtgccgcccggccccgccccgccccgcccgcctccccgcctccctgtgccgggccccgcgcgggaggccctgggcgcgccgggaccgagggcgcgccccagatccgcgcgccctacagccccgagtctcctccagtttcagacccccggaggcgccccacaggcccgacgcagcggcacagatcctttctctaccattttgctattttgttcatagtgggctttggaggattcctgttgattttttaaaaaatactgcattaaaatgtttattttggtgactcgaggtggttttggtttctttctttttttttttttttcactcccttaaattttgcaccccaggcgagtagtgtctcactcgcctttcctcagtccgggcctggccagcgacactcgtcccagagcgcgtgggcgcccccagatgtcccgcccgcgagtgcgccccggcccaggggcgagacccaagccaggcccctggggacagccacgtgcccgcgtgcccagtgcgctccctgtgttcaagttggagaaatgacacctggaaaaatgtgcagacgcttctgaaagggcaaagacgacgccaaagaagacgccggagacctcgaatagggcgcaggtggacatctctgattttcagcagaccagcctgtatgtgtctgaagtctagcaacgacattcaccaacaaggcgggacagcggttccacctaccttactgcaggagaggaaggggctttcagtataggaaagccagaactcaatgggaggagggttcctccacccctcactcctgtgtggtcttggaccagggacttttctgtctctgggccagtttcacttgtgtaatgggtttaataatacctgcatgccagttctggggaggtacccgggaaagaaaacttaagaaagcgcccagcacaaccctagacccaaggcattcattcttctttcattcaataaacagtttgctaggagctggacccactgttcatgcaacaggccaaacctattcctgcctctgggcctttgccccagcatttcccttgcccgtaacactccaggatggcttcatctctgaagtgccatccctaaccatatttttgcaaatcctccccccagttccgtttccttctctctctctctctctctgtttttttttttttttttttttttttttttttttttttttttttagatggagtttttctctgttgcccaggctggagtgcaatggccagatctcagttcactgcaacatcacctgcctgggttcaagtgattctcctgcctcaacctcccaagtaacttggattacaggcatgcgccagcacacccagctaattttctgtatttttagtagagacaggatttcaccatgttggcctggccggtctcaaactcctgacctcaggtgatccaccggccttggcctcccaaagtgctgggattacaggcctgagccactgcgcctggccccttctctctcattttcatagcatgtttaccccactacctgcaattgtttgttttttttttttcttttctttctttttttttccttttgacagaatcttgctgtcacccaggcaggaatgcagtggtgcaatcctagcttactgcagccttgaactcctggcctcaagcaatcctcctgccttggcctcccaaggtgctaggattacaggcatgcgccaccatgattggccttgaaattcttattcgttttctgtgtcttctccccttcccgtgaaggcggaaatcttttcggtcttgtttcactgcttaaacccagtgcctgacaaatctgttgcttaataaatatttgttgagtgggagaatcaacaagcaataagtaataggggatttttcagtgagcaaaataaacatgacccatttccttatggagttcacaactgagccagggagagagcccttaaaataattgagtgtgtaatgagctgagggaaatgggaggtgcatagggaggggtttgctgaggacatggggttttttgtttgtttgttttttgatggatcttactctgttgcccaggctggagtgcagtggcacgatcttggctcactgcaacctccgcctcccaggttcaagcaattctcctgcctcagcctccagagtagctgggattacaggtgcatgccaccacgcctgcctaatttttgtatttttagtagaggcagggtttcaccatattggacaggctggtcttgaactcctgacctcaagagatctgcctgtctcggtctccctaattgctgggattacagacgcgtgagccactgcacctgactgaggatgtgattttgagcttaagtctgaaaatgaagaggagccatcctagggaagccatagggatgtgtttcaggtgggggaaggcatgagcaaaggcccagaggagagtgggcaaggcattcttgcaactgaaccaggcattcactgtagctgcagaaaagaaagaggagaaagtgaagccatgggtgagaactgcagtgggcccttgaacatgagtttgaaccgtgcacatcttttttttttttttttttgaggcagagtctcgctctgtcaccctggctggagtgcagtggagcaatctcagctcactgcaatctccacctccagggttcaagctattctcctgcctcagcttcccaagtatctgggactacaggcacacgccacctcacccggttaatttttgtatttttagtacagacgggattttaccatgttggccaggctggtatcgaactcctgacctcagctgatctgatcagcctcccaaagtgaggtcatctttaaacagaatgtttttcaataaatatattggaaacatttttagagatttgcaatagtttgaaaagacttgcagatgaacttggtagccaagaaatattaaaaaaaaattaggtatgtcatgaatgcataaaatatatgtagatactagtctgttttattatttttgttattattttcttttagagacagggtcttgctctgttgcccaggctggagagcagtggcccaatcatggctcactgtaacctccaactcctgggttcaagcgatcttcctggcaagcaccaacacgcccggctaatttttttactttttatagagacgaggtctcaccatgttgcccaggctggtctctaactcctgaactcaagtgatcctcctgcctctacctcccacagtgccgagattacaggtataagccaccatgtccagccctattttataatttgctaacataaaatatacacaaatctgttacaaaaagttaaaatgtattaaaacgtacacacacacttacaaaccatacatggtgttattccaagtcaagagaaatgtaaataaatgtaaagatgcagcattcaatcataactgcataaaattaactatagaatatattgtgttattgtaacaatttcatagccacctcctgttgctactggagtgagtgcaagtgttgcaagtatccgctttaaatgccatgttacattaattatctccctgtgggcagttcacctctccaggaatttgtgccccggtaaaaagggatctcttggcggttcccgcgtatttttcactgtgtttagtgcaataccgcaaacattgaataacatcctgagacccatgtaaagtgccactagtgatgctggaaatgctcccgagaagcagagaaaagtcaggacaggacaagaaaaagttgaattgcttgctacgtaacataaatggagctctacagctgcggttgtctgcttcagacagacaattcatcttgtaaacaaatttatggcattgataaatattgtagcgttctgtaactgtaaatgtattttctcttccttgtgattttctttttctttttctttttttcttctttttggagacagggtttcactctgctgcccagactggagtgcagtggcaccatcagggctcactgcagcctctacctcctgatctcgggtgatcctcctgcctcagcctcccagggagctgggattacagccacatgacaccatgcccagctgtgattttttaaataacattttctcttctctaacttgctttattctaagactgtagtgtgtagaggctgggcacagtggttcactcctgtaatcccagcactttgcaagacagagggaggcggatcacttgaggtcaggagttcgagaccagcctggccaacattacaaaaccccatatttactaaaaatacaaaaattagccaggcgtggtgtgcttgtaattccagctactctggagggctgaggcatgagaattacttgaacctaacaggcggaggttgcagtgagccaagatcatgccactagcgcactccagcctaggtgatgcagtaagactctatctcaaaataataataataataaagtaagaaagaaagaaatacagtatgtaatacttgtaacatacaaaatgcctgttaatcggctgtttatgttattgctaagtcttcaggtcaacagcaggctataagtagttaagttttcagggagtcaaaagttatattcagattttcaactctgtaggggtgaattggcaccagtagccacaacactattgaaaggtcaactataaaaagtgcagaacctagaatatgccatgttaagatttgctttggggctgggtatggtggttcatgcttgtaatcataatcccagcactttgggatgccaaggtgggtgcatcacttgagcccaggagttcgagaccagcctgggcaacaaggcaaaaccctgtctctaccaaaaatacaaaaaaaatagccaggcatggtggtgggtgcctatagtcccagatactcaggaggctgaggtaggaggatcgcttgagcccaggaggcagaggctgcagtgagctgagatcgccccactgcactccagcctaagcaacagagggagactccatctcaaaaaaaaaaaaaaagatttgcatctccatgatactaaaaatgcatttggtaaacttcacagccattcagatatgaaaccataagactttatgatatgaaaattttattttataatttcagactgaggaaagtttctccaagccagacgtgaatcccaagtttaactttgtaaaataacaaacttggctatgtagaaattaagattataagaatagccaaaaaaaaagtctcatatatcaagtcaaaagacagatttttaaagaaatttttcttggccaggtatagtggctcacgcctgtaatcccggcactttgggaggccaaggcaggcggatcacttgaggtcaggagtttcagaccagcctgaccaacatggtgaagccccgtctctactaaatacaaagaattagctgggcgtggtgatgcatgcctgtaatcccagctacttgagaggctgaggcaggaggctcgctttaacccgggaggcagaggttgcagtgagccgagatcgcgccattgcactccagcctgagcaacaagagcaaaactccatctcaaaagagaaaagaaaaaaaaaagaaaaatttttctgttgatgcataacagacgtacatagttttggggtacatgtgataatttaatacattcatataatttgtaaagatcaaatcagtgcacttgggatatccctcaccttaaatatttgtcttttctttatgttagaaacagtcaaattcttctagctattttgaaatattcaataggctattgtaaactatagtcaccctactgatctaacaaacactgtcttatttcttctatcaaattgtacatttgtacctagcaatcagcttctcttcatctccctctttctcctaccctttctggtaaaccaacaatctactgtctatcttttttttttttttttgagacggagtctcgctctgttgcccaggctggagtgcagtggcacgatcccggctcactgcaaactccacctcctgggttcacgccattctcctgcctcagcctcccgagtagctgggactacaggcgcccgccaccgagtccggctaattttttgtatttttagtagagacgggctttcaccgtggtctcaatctcttgaccttaggtgatctacctgccttggcctcccaaagtgctgggattacagttgtgagccaccgcgcccagctactgtctatctttatgagatccactttttttttgtttttgtttttgagacaaaatctcgctctgtcacccaggctgcagcgcagtggtgcgatcttggttcactgcaaccttcacctcctggattcaagcaattctcctgcctcagcctcccgagtagctgggactacaggtgctcaccaccacatccggttaaatttttgtatttttagtagagatggggttttaccatgttggccaggctggtctcgaattcctgacctcaagtgatccatccacctcggcctcccaaagtgcagggattacaggcatgagccactgcgcccgtccgagatccacttttttagctcccacataggagggagaacacgggatatttgtccaaaagacagacgttttaagtgaggaaagtatatgcaacagataaaaggcatgcattcagtctgggcaacatagcgagaccttgtctctacaaagaatgtgaaaattagctaagtgtggtgatgtgcacggatcatcccagctacatgggaggctgaagggggaggattgctggagcccaggaattcgaggctgcagtgagctatgattgcaccactgcactccagcctggacaacagagcaagaccctgtctctaggaaaaaaaaaaaaaaaaaaagcttaagggtcagaaatgagattttttttttatttgtacaaatttaagtggtacaagtgcaattttgttacatggatatattgcatcgtggggaagcctatgcctctggtgtatccattacccaaataacatacattgtgccccagaaatttaaaatgaaagactaagagagctttttgggagaattgaaatatacctccttgttttggtttattatagtaaaatacacataacacagaatttatgattttaaccattttaaagtgtacgactcaggaatattcagtactttcacgacgctgtgcaaccgttgtcaccatctcattgcaaaatgttttcatcaccccaaacagaaaccctgtccccatgggcactcactccccacctcccctccccagccccaggcatccactaatccacttcctatctctgtggacttgcctgttctgcaaactccatataaatggagcaatataatatgcgagctttggggactagctacttttatttggcataatgtgttcaaagttcatccttgtcattgcctgaaccagtgctttattcctttttatggctgaaggatattccatcattccttagagtttgaatgatcagacccattccacactcctattttgaactcatgcttatttatttatttatatatgtatttattgagacagggtctcactcttgttgctcaggctagagtgcagtggtgctatctcggctcactgcagccttcaactctctggttcaagcgattctcctgcctcagcctcccaagtagctgggattacagaagtgtgctaccatgccccgctaatttttgtattttttggtagagacagggttttgtcatgttggccaggctggtctccaactcctgacctcaagtgatcctcccgccttggcctcccaaaagtgctgtgattacaggcgtgagccactgtgcccaaataaacccatgctttttgaagcctgcaatgtgaaagtgcaaaccacgatagtcaataataattttattgtactttttaattaattaattaattttttttgagacagagtctcactctgtagcccaggctggagtgcagtggtgccacctcggctcactgcaacctccgcctcccaggttcaagcgattctcctgcctcatcctcctgagtagctgggattacaggtgcccaccaccacacccggctaatttttgtatttttgtatttttagtagagatggggtttcaccatgttggccaggctggtctccaactcctgacctcaagtgatctgccgggctcagcctccgaaagtgttgggattacaggcgtgagccagcacgcccggcttaattgcacatttaaaaataactaaaagagtataactggattgtttgtcacacaaaggataaatgcttgaggggatggagaccccattctccatgaagtgatgattacacattgcatgcctgtgtcaaaacatctcgtgtactctgtaaatataatcaaccactatgtacccacaaaaattaaaaacacaaatttaaaaataaaagaagtgcaacccacaggaatttctgggcgatgagcttcctccagtgtcttatgctgctagggccatgatcagaattgaggcttcatgttagagtctcagcacagatattacctgggctcaacatagaaaactcttagaaaatgattgggagagtcaggcgcggtggctcacgcctgtaatcccagcactttgggaggccgaggagggtggaccacctgaggtcaggagttcaagaccagcctgggcaagatggtgaaaccccatctctactaaaaatacaaaaattagctgggtgtggtggcatgagcctgtaatacaagctattcaggaggctgaggcaggagagtcgcttgagcccaggaggcagacgttgcagtgagccaagattgtgccattgcactccagcctgggctatagagcgagactccatctgaaaataaataaataaataaaatgattgagaggccaaggggggtggatcacttgagttcaggagttcaagaccagcctgggcaacatggtgaaaccctgcctctacaaaaagtaccaaaattgccactgcactccagcctgaatgacaaagtgagaccctgtctcaaaaaagagagagaaaggaagagagagagagagagaaagaaagagagaaagagagaagagagagagaaagagatagaaaaaaggaaatcaaaggaaggggagggggagggggaggggagggggagggagggggaaggggagaggggaggggaggggaggagagggaggaagggaagaagagaagggaagggcagggcttctatgtcaaactatttgtgcctcaatcaggcaaagaatataaaggaagtattaccaatttatctggagatactggcgcaatgatctttgcttctctctcttcccatttccctctcctcggtgcacttttcaagaaagacgaagacaaaatttatgtaaaatattctcatttctcaaaagcacttcttggatttgtttcgcaaatgtacaagaccctttcccactggctgagagaggtagttacccgaatctaggtagaaaatgattatataaaattttataagtaaaattatttttgcaacataaacactgaaaagatattcagcgaaacaatgtcatgtttcaagaaaagaccaagctacatctacatgtcctgagatgagaacttcctatatatataactacctaaaaagaatcaaatgcagaaccatgtacctgaaacactatcatttgcattttaaaggggggtgaggtacagccacgcacactcacctatacgcattcacagatatttccagaatcttgaagtacgtctccaaaaacacattcaaaactggcaatctttttttgtctgtttgaagagttttaaccatgtatattaattccctttttaaaacacagcatgagacagttaattttttttttttttttcagaacagcatcaccatagctacaaaatgacataaaataaaatacaaagagagccgggcgtggtatgccccgcctgtagtcctggctactccggaggctgaggcggaaggaacgcttgagcccgggagttcaaggatatagagaaacatgttcccgcctctgagtaccactgtattccagcgtggttgacatagggagaccccacctcctaagaaaaaaaaaaaaaaaaaaaacttagaaaaacaattaacagcaatggctctgacctaaattttttaaaaaactaatgctttataacttgaataaataaagaaatgtgccttattatttctgggaaaaagaacagaatattggaggccaggcacagtggctcatgcctataatcccagcgctttggggggcccaggcaagaggatcacataaggccaggagttcaagaccagcctgggcaacatagcaagaccctgtctctacaaaaaaaaaaaaaaaaaaaaaaattgtaaaaattagctgaatgtggtggtgcctgcctgtggtcccagctactccagaggctgaggtgggaggatcacttgagtctaggatttcaaggctgcagttagctatgattgattgtatcgttgcacttcagcctgggtgacagagccagatcttgtctcaaaaaaaaaaaaaaaaaacttcaaaattatacctaaaaggtatagaaaaattattctgaagttcatctggcatagggtttctcaacctcagggatatggacactgaggcatggataactcttcgttgtggaaggctgtactgcacattgtagaatgttgtgtgtgtgtgtgtgtgtgtgtgtgtccgagtctggctctgtcacccaggctggactatagtggcacaatctcagctcactgcaacctccacctcccaagttcaagtgattctcctgcctcagtctcccgagaagctgggattacaggtgcccaccaccgtgtccggctaattttgttgtgtttttagtagagacagagtttcaccatgttggccaggctggtctcgaactcctgacctcaagtgaccaggagcatggactcacatcccagttctgctgctagaccaagatgtttggccaagaccaagtagagtacctcaaccactagctctttctccagaaaaactctcttgtggctgtgaactgcctccatcaacccaatcaccaatctcagaccctggatgtccaccacaagacccgctgcctactctgccctctgaacacctctctacctgcttccttcactttcagttctttcttatttatttatttatttttgagattaaatcttgctatgttgcccaggctggggtgcagtggcacgttctcggctcactgcaacctcctcctcccaggttcaagcatttctcctaactcagcctcccgagtagctgggactacaagcatgtgccaccacacccagctaatttttatatttttagtcgagatgaggttttaccatgttggccaggctggtcttgaactcctgacctcgttatctgcctgcctcggcctcccaaagtgctaggattgcaggtgtgagccactgcacacggccctccttttcagttttttaaagacagggtctcactctgtcacccaggctggagtacagtggcacaagctcagcccacagcaacctccgcctccgaggttcgaacgattctcctgcctcaccttcccaagtagctaggactacaggtgtgcaccaccacacccagctaatttttgtatttttaatagagacgagttttcaccatgttggccacactggtcttgaccacctgacctcaggtgatccacccacctcagcctcccgaagtgctaggattataggcgtgagccactgcacgcagccccatctgacttcttaagtcaccttgccttattacccatcagaggaagacatttctactcccttccctctctgagatgctctatttgcgttaaaacaatcgtaacagtccatgctttcattatgtgcagtagctcaaaactagaagcaacccagatttttatcaacaggtgaatggataaaccaacagtgatataaccatgccatggatcactgcttcacaataaaaaggaaggaactattgatacatccaacaatagggatgtatctcaaaataattctgctgacttagaagtcaggccataaaaaaatgcttggtacatgattccagaaaatcttagaaattctgctgacttagaagaagccaggccaaaaaaaaaaaaaaaaatgcatggtacatgattccatttccatgcctgtaatcccagcactttgggaggccaaggcgggtggatcacaaggtcaggagatcaagaccatcctggccaacatggtgaaaccccgtctttactaaaacttcaaaaattagctaggtgtagtggcaggcacctgtaatcccagctactcaggaggctgaggcagtagaatcgcttgaacctgggaggtagaggttgcagtgagccaagatcaagccactaaactccagcctgggtgacagagcgagactccatctcaaaaaaataaataaataaaactcatccataatgacagacagcaaatcacgagctgccaggagaggggaaagagggaggggttccaaagaagcatgtagaaactttcagctgggcacagtggctcacgcctgtaatcccagcactttgggaggcagaggtgggcagatcacttgaggtcaggagttcgagaccagcctggccaaaatggtgaaccccgtctgtactaaaaaaaaaaaaaaaaatagtggggcatggtcgtgggtgcctgtaatcccagctacttgggaggctgaggcaggaaaatcacttgaacccaggaggcagaggtcgtaatgagccgacatcacaccattgcactccagcctgggtgacagagtgagactccatcaaaaagaaaaagaaaaaaagaaagaaagaagaaaagagaagaaaagagaaaagatcaaactactctataatgacagacagcaaatcactaggtgccaggagagggaaagagggaggggttccaaaggagcatgtagaaactttcagctgggctcaatagctcatgcctgtaatcccagcactttgggaggcagaggtgagcagatcacttgaggccagcagttcgagaccagcctggccaaaatggtgaaaccccgtctctactaaaaatacaaaaaaaaaaaaaaaaaaaaaattggcggggcgtggtggtgggtgcctgtaattccagctactcaggaggctgaggcaagagaatcatttaaacccaggaggcagaggttgtaatgagccaagattacaccattgcactccagcctgggtgacagagcgagactctgtctcaaaaaaaaaaaaaagaaagaaagaaagaaaagaaactttcagaggtgatggatgtgttgctgtcctgatggtggtggtgttttcacaggtgtagacatacagcaaagtgtatcatattgtacaccttaaatatgagtggtttattgtatgtcaattacactttaataaagttgttttttaagcaataaaagttgcattttacaagtttcaactggcgatttttttgttagtttgtttgagacagggtctggttctgttgcccagcctggagtgcagtggtgcaatcatagctcacagcagccttgaccgcttgggttcaagcaatcctcccacctcagccttccgagtagctgggattgcaggtgctcgtcaccacacccggctaattattttatttcttgtagagacaaggttttgccatgttatgttgcccaggctggtcttgaactcctgggctcaataaatccatccacctcagcctcctaaagtgctggggttacaggtgtgagccactttccccggcctcctagactgacgatcttttgatggtgtttgctcttccccacactctgaagtttaaggacacaatcaatgagaccagtctctacagcagaacacgttggtgctacctgctattctgttgtggagttggtggttgggaatttcctattgagtagctctcattcaaggggttataattccgtaaaagctgcccccatcctatctgatgtaaaaaccttcagagttgaaaccatccatcactagttacaaagtagctcaacaagaatccaagaggcaggccggatgtgctggctcaggcctgtaatcccagcactttgggaggccaaggcaggcggatcaggaggtcaggagatcaagaccatcctggctaacacagtgaaaccccgtctctactgaaaatacaaaaaaagtagccaggcgtggtggcatgtgccttgggaggctgaggcaggagaatcgcttgaacccgggaggcagaggctgcagtgaaccgagatcgtgccactgcactccagcctgggtgacagagcgagactccatctcaaaaaaaaaaaaaaaatcgaagaggcagtaaacatcccgagcaaaggagaccacgacgaggtaagagattgtaactctgcaccagacatttcacaggactgaattaagcgtcacggatttgtggtgaaaagtgagcataacaaatttcatccagccaatgaacctctccagacaggaatgcaaccagcttttaaagggacagccgcaagcaatatgaaggtgtttccagctattaaggatgcacctggccagcattattctaagtgaagtaactcaggaatggaaaggcgaatatcctatgttctcattgataagtgggagctaagttaggaggatgcaaaggcataagagtgatataatggccaggcgcggtggctcatgcctataatcccaacactttgggaggccgaggtgggcggatcacgagatcatgagttcgagaccagcctggccaacatggtgaaaccccgtctctactaaaaatacaaaaattagccaggcgtggtgctgcacacctgtaatcccagccaccagagaggctgaagcaggagaatcgcttgaaaccagagggcggaggttgcagtgagccgagaccgcaccactgcactccagcctgggcaagaagagcaaaactctgtctttaaaaaaaaaaaaaaaaaaaaaagtgatataatggactttggggacttgggcagggaaaattggggggagaaggatagaagactacatattaggtacagtgtacactgcttgggtgacaggtgcaccaaaagctcagaaattgccactaaaaagcttatccatgtaaccaaaaaccacctgcaccctcaaaactactgaaataaaaataaaaatttaagaaataaataaatataccttcttcctaggaaaataaataaataatgcaccagccaggctcagtggctcacgcctataatcccgacactttgagaggctgaggcaggtggatcacctgaggtcaggtgttcaagaccagcctggccaatgtggtgaaaccccgtctctactaaaaatacagcagttagccaggcatggtggtgcacgcctgtaatcccagctagtccagaggctgaggcaggagaatcacttgaacctgggaggcagaggttgcagtgagctgagctcacgccattgcactccagcctgggtgacagagcgagactctgtctcaataataataatgataataataataataataataatgcacgtatccaggtgcagtgactcacacctgtaatccaccactttggaaagccaaggtgagagtatctctagaggccaggagttcaagacccacttgggcaacatagcaagaccccatctcttaaagatttcaaattggccagtcatgatggtatatccctatagtcccagcattttggaaggctgaggtaagaggatgacttgagcccaggaggtcgaggctgcagtgagcaatgatcataccactgcactccagcctgggtgacagagtgagaccctgtctctaaaaaaattaataaataaataaaataaggagtcagagagagttttgacagaagagaataaggtcatgtaaagatagttgcagagactggagtgatttagccacaaacaaaagaatgccaatagccaccagaagtgagaagaagcaagaaatgtgtgcgtgtctgtgtgtatgtgtgtgtgtgtgtgtgtgtgtattttctttttttgtttgagacagactttcactttagtcacccaggctggagtgcaatggcgtgacctcggctcactgcaacctccgcctcctgggttcaagcgattctcctgactcagcctcctgagtagctgggattacaggcgcacaccacaacacctggctacttttatttttgggagacgggatttcaccatgttggtcaggctagtctcgaactcctgacctcagatgatccatccaccttggcctctcaaagccatgaggcaccgcacccagctgtatgtgtgtattttttaattgatgtgaaattcccataaaataagatcgtggatcttaaagtgaataacttagtggtattttgtacatttacaatgttgtacaaccaccacctctatcaagttcctgaacattttcatcaccttcaaagggaaacctcacatatattaagtagctgttccccattccaccccctccgtgacaactagtaatttactttctgtctctgtgaatttccctatgccagatttttttttttttttttgagatggagtttcactcttattgcccaggctggagtgcaggggtatgatctcggttcactgcaacctccgcctctcgagttcaagtgattctcctgcctcagcctcccaactagcttggattacaggcatgtgccaccacgcctggctaagttttgtatttttagtagagacggggtttcatcatgttggccaggctggtctcgaactcctgacttcaagtgatctgcccgcctcggactccccgagtgctggcattacaggtgtgagccaccgcaactggccagagtttccttcctatttatttatttattttatttttgagatggagttttgcttttgttgcccaggctggagtacagtgacgtggtctcggctcactgcaacctccgcctcccgaattcaagtgattcttctgcctcagcctcccaagtagctgggattacaagtgcccgccaccatgcccagctaatttttgtattttgagtagagacagggtttcaccacattggccaggctggtctcgaactcctgacctcaagtgatccacctgcctcggccttccaagtgctgggattacaggcatgagccaccgcgcctggccgaatgtccttcctttttaaggctgaatcctatcccaccctacggagggaccacattgtttatccattcgtctcttgctgggcacttgggtgccttctgtctttggctgttatgaatcacactgctgtggacatgggtgtacaagtgtctctttgagtccctgctttcaaatctcgtgcgtgtatacccagaagcagaatttctaggtcatatggtaattctatgtttaatttctttttttttcttttattttttttgagactgtgtctcattctgtcgcccaggctggagtgcaatggcgtgatctcagctcactgcaacctccacctcccaggctcaagcgattctcgtgcctcagcctcctgagtggctaagattacaagggcccgccaccccacctagctaatttttttgtattttgagtagagacagggtttcaccacattgcccaggctggtcttgactcaggcaatcttccggcctcggcctcccaaagtgctgggattacagatgtgagccaccgtgcccggcctgattctatgtttaatttctttaaggaaccagtgtacccttttccatagcagcggcaccattttatattcccaccatcactgcaccggaatttcgattcttccccatccttgccttgtggcgtacacatcccgcaccccaacaccttcttggtgtctgcttccagagcaccccactgggtgaccgtcaagctccacagctgagtttctgaccactgtgcttcccagattccctcctgaatgctccatcttccgaatgcctttgggccacagatggcccgggaaggaggctttctgctagcataagtcactgtagtacagtgtacatagcagatatccaggtcctgggagcatcctttccctagttctttctttttttttttttttcctgagatggattccactcttgccacccaggctagagtgcagtggcgtgatctctgctcaccacaacctccgcctcctgggttcaagcgattctcccacctcagcctcccaagtaactgggattacaggcatgcgccaccatgcccagctaattttttttttagtatttttttttttagtagagacggagtttcttcaagttggtcaggctggtcttgaactcccgaccttaggtgatctgcccgccttggcttcccaaagtgctgggattacaggcatgagccaacgcgcccagccttctttccctaattcttggtcaaccatccccactcactttccacaacctgactcaagccctgccattcttctcagctcccaagacctcccacccctgcctgagacacaccagctggtggccttcctcgctcccaagaggaagagcagtcatgcggtccattacccgccttcccagtctttacccggaactccatccgcacccacctcatggccttccttcctccctgttcccggctgtgatcagcccttcccctctatcctgggcctgtccctttgcaacttccaggttggcatccaccagccattctgtctctcctgagcctctctgctccattcccctggctgtggactcagccttctcagatcccagctcttccacatcccggctgtgtgagaggcagatgcacctcttctgtaaaatgaggaataaaaaaagaaatatgggaccaggcacagtgccttatgcgttaagaggccaaggcgggaggattgcttgagcccaggagtttgaaaccagcctgggcaacatagtgaaagcccgtctctactaaaaatataaaaactagctggccatggtagcgggtgcctgtaatcccagctactcgggaggctgaggcaggagaatcgtttgaacccaggaggcggaggttgcagtgagctgagatcacaccactgcactccagcctggtgacagagcgagactccatctcaaaaaaaaaaaagaataagaataaataaaattagctgggcatggtggcacatgcctatagtcccagctactcaggaggctgaggcaggaggatcgcttgagcccaggggtttaaggatgcagtgagtcacgatcatgccactgcactgcagcctgggagacagagtgagaccccatctcaataacaacaacatacaaacaaaaatgatgcctccgtatccttgtcacaaacaattggtgctattttcttagtgcataattaacaaaattcacccatgcttccagttcaccagatcagtggtgcctgtaccatcccacacagaagaaaatcttatttattttctatcttgattttttttttttaagatggagtctcactctgtcacccaggctggagtgcagtggcatgatctcagctcactgcgacctctgcctcccgggttcaagcgattctccttccatagcctcccaagtatctggaaccaggcaagtgccaccacacctagctaatttttgtatttttattagagacagggtttcaccatgttggccaggctggtcttagaactcccgacctcaaataatctgctcacctcggcctcccaaagtgctaggattacaggcgtgagccaccacaacagacctatttttaaattgggtgtaatttacatgcaataagtttatgtaaactgtaagcagaaggtttgatgagccttgatagcatacacaccttttaaccatgacccctatcaagatatagaatatttctaaaaatagtactaccattccatccagcaatcccactactgggtatctacccaaaggaaaagaaatcaatatatcaaaaagatacttgcacccatatgtttattgcagcaccattcacaatagcaaagacatggaatcaacctaagtgtccatcaatggatgactgaataaagaaaatgtggtatacatacaccatagaatactgttcagccataaatagtatagtattctttgcaaaataatgagatcatgtcttttgcaggttcatggatggaactgtaggccattctctctctctctttctttcttttttttttttgagacggagtctggctctgtctcccaggctggagtgcagtggcacaatctcggttcactgcaacctccgcctccgggttcaagagattctcctgctcagcctcctgagtagctgggattacaggcacccgccaccacacctggctaaattttgtatttttagtagagacggggtttcaccatgttggtcagactggtctctaagtcctgacctcatgatctgcccacctcagcctccccgagtgctgggattacaggcgtgagccaccgcgcccggccctggaggccattctcttatgtgaaacaagccagacacagacagacaaatatcacatgttcttacttataagtgggagctaaacaatgtgtacacctggacgtagagactggggtgattgacaatagagactcaaaagggtggcgcaaggcggtgggtgatgagaaaatacataatgtatatgatgtacattatttggtaacggatatcctaaaagccctgactttaccactaggagcacaactatgcatatcacaaaatggcaaggctgaacgtggtgactcaggcctgtaatcccagcacttcaggaggccgaggcaggctgatggcttgagatcagaagttggagaccagcctgggcgagtccccatctctacaaaaactacaaaacttagccaggcgtggtggcacatggctgtgttccacctactcaggaggctgaggttgggaggatcgcttgaacccaggaggtggagattgcagggagacaagatggcaccactgcactccagcctgggtgatagagtgagatcctgtctcagaatcaaaaatagcacttgtaccccatacatttacatatattttaaaaaaacgctatatgtgtaaacttgttttttaaaaagatgtgaaatattggccaggcacagtggctcacgcctgtaatcctaccactttgggaggctgagagaggtggatcacctgaggtcaggagtttgataccagcctagccaacatggtgaaacccggtctctactaaaaatacaaaaaagctagccaggcagcagctgtaaactcaggaggctgaggcaggagaatcgcttgaacctgggaggtggaggttgcagagagccgagatcgctccactgcactccagcctgggcgacagagcaagactctgcttcaaaaataaataataaaaaaaaagatgcggagtatttccattaccccaaaaatcttcctcatgtctcttccctgtctgttggggtccccaacatccagaggtaactgtgattctccatcatgttaaactcctttgatctcttagaggactttatagaaatggaatcttgtggtctggtacgggttgagctccctttgctcaacataacgtcggtagcattcagcagtattgctgaggggacagagggtcatgttcacagcagcactattcacaatagccaagaggtaaaagcaacccaagtgtccatcaatagatgaataggtaaacacaatgtggtatatccatacagtggaaaattatttagccattaaaaggaaggaaatcccgacacatggtaaaacatggatgaaccttgaggacattatgctcaatgaaaagagcaattagccagtctcaacaaatcctgtcttttttttttttcatagactgagtctcactctgtcacccaggctggagtgcaatggcgccatctcggctcactgcaacctctgcctcccgggttcaagtgattctcctgcctcagcctcccgagtagctgggattacaggtgcatgccaccacgcccagctaatttttgtatttttagtagagacggggtttcaccatcttggccaggctggtctccaactcctgacctcgtgatccacccgccttggcctcccaaagtgctgagattacaggcgtgagccactgcgcccggccggtcatggctttttattgctgtgttcacagctctgtcatctttctggcgcattaggcttcctgcaaggcttggacttccagccttggctcctctgctccagtgctgtggacacggaccaaggagtgctctcctaggaatgatcatgtctcaccagtgccctggtgaagaaccttgcgcagagccatccatgaccaactgtggcatttcccgaggtgctgggcatggattactgttagtaagataagtgactcgaggtggcataaaggcgtgatgatgtcctttcacacagcgaggacgtgattgcctcttaaattctctcggttgactctgggaatacgtctctatttggtgttactccggcttttcttgttttgttgtggtaaaaaacatataaaatttaccatcctaactttttttttttttgagatggagtctcactctgtcacccaggttgcagtgcagtgcacgatctcagctcactgcaacctcccgaattcaagaatttctcctgcctcagcctcctgagtagctgggattacaggaatctgccaccatgccttgctaatttttgtatttttagtagagacgggatttcaccatgttggccaggctggtattgaactcctgacctcaaatgatcctcctgcctcagcctcccaaactgctgggatcacaggtgcccaccaccacagccagttattttttgtatatttagtagaggcagggtttcaccatgttggccaggctggtctcaaactcctgacctcaagtgatccacccacctcagcctcccaaagtgctgggattacagcaggcatgagccacagcacccggccatcctaaccatcttttttttttttttttttttgagttggagtcttgctctgtcacccagtctggagtgcagtggtgcgatctcagctcactgcaacctctacctcccgggttcaagcgattctcctccctcagcttcccaagtagctgggactacaggtgtgcaccaccatgcccagctaatttttgtattttttagtagacatggggtttcactacatgttgcccaggctggtctcgagctcctgacctcaggtgatctgcctgcctcggcctcccaaagtactgagattatagtcatgagcaccacgcccagccatcctaatcattgtgtgtgtgtttgtgtgtatgtgtgtgtgacaaagttttgcccttgttgcccaggctggagtgccatggcgcgatcttggctcgctgcaacctccacctcccgggttcaagggattctcctgcgtctgcctcctgagtagctaggattacaggcacccgccaccatgcccagctattttttgtatttttagtagagacaggttttcaccatgttggccaggctggtctcgatctcctgacatcaggtgatccacacaccttggcctcccaaagtgctgggattataggtgtgaggcaccgcgcccggccatcctgaccatttttaagtgcatagctgagtggcattgaatacattcacctggttgagtgaccatcaccaccatccatctccagaactttcacaccttcccaaactgaaactcttcccatgaaacattcactccccacccccactccccagcccctggcaccctctatcctactttctctctctatgaatctgacaactctaggaatctcatatgagtgggatgatacaggatttgtcctttggagactggctaatttcactgagctatgacgtcctcaagatttatccacattgtagcatgtgtcagaatttctttcttttttatggctaaataatattccactgtatggatataccacgttgtttttatccattcatctgttgatggacacttgggttgcttccacctcttggctgttgtgaatagtgctgctatgaacatgggtgtgcaaatatctctttgatagtctaatttaaactccttgggatatatacacataagtgggattgctggatcataggatgattctatttacttttttgaggaaacgccatactgttttgcacagtggctgcaccattttgcattcccaccaataatgggaatttccaacttcttcacatcttcccccacacttcttattttctaatatatatcatatatatataatcatatatacagtgttattatattagcatattcgatcatatatagtgttattagtcacatagattatatatatattttttatttgtgtaaatttactgggtacaagtgctatctttgtttttgttttcatttttattttgagatggagtctcactctgtcacccaggctggagtgcagtggcatgatctcgactgactgcaacctccacatccagggttcaagcaatcctcccaacctcagcaccacgagtagctaggattgcaggcatgtgccaccatgcctggctaattttgtatttttagtagagacagggtttcaccatgttggccaggctggtctcgaactcctgacctcaggtgatctgcctgccttagcctcccaaagtgctgggattacaggcatgagccatcatgcttggcctcctttttgtttttgagacaaggtctggttctatcgctcagggtggagtgcagtggcgtgatctcagctccctgcaacctccgccttctgggttcaagtgatcctcccaaccttggcctcctgactagctgggacataggcatgtgccaccaagcctggctaagttttgtattttttgtaaagaaggggtcccgctatgttgcccaggctagtcttgaactcctgagctctgatatataccatacatatatgatatataatatatatcagcatatatatttacgaggatatatatatgcatgtatatgtgtgtgtgaggcaatatatcattgcatttccctaatgactaatgatgtcgagcatctttttcatgtccttattggccatttatacatcttctttggagaaatgtctattcaagtcctttgcccagtttttagttggattattggatttttgttgttgaattgcagaaggtatccttatgtattatggataccaacccctcatcaggtatatatttgcgaatgttttctctcattctgtaggttgccttttcgctttgttgattgtgtcctttgacacacaaaaaattttaagtttgaagtaatcccatttgtctatttttggcttttattgcccatacttttgtgtcatattctttttttaattaattaatttattttttgagacagggtctcactctgtcgcccaggctggagtgcagtggtgcagtctcgtctcactgcaacctctgcctcctggattcaagcaattctcctgcctcagcctcccaagtagctgggactacaggcatacgccaccacgctcagctaatttttttgtatttttagtagagacggggtttcacgaactcctggcctcaagtgatccacccaccttggcctcccagagtgctgggattacaggcgtgagccaccatgcccagccattttgtgtcatattcaataaaccattgcagaagtgaacagaacaaacttttttcagcctcctaacttttctatgtgctgctcttctccctaaaaggtctcttctttggcccagctaactcttatttgtctattaatgctaacttcttgtgggaagacttccctgactatccctgggcccaaaccttgggtgtacacccagaggaatagaaatcattctatcataaagatacacggaagtgtatgttcattatagcactattcacgatagcaaagacatggaatcaacataaatgcccatcaacgatagactggataaagaaaatatggtatatggccgggcacggtggctcatgcctataatcctagcactttgagaggccaagacgggcggatcacctgaggtcaggagtttgagacaagcctggccaacatggtaaaaccctgtctctactaaaaatacaaaaattagccaggcatggtggtgggcacctgtaatcccagctgctcaggaggctgaggtgagataatcgcttgaacctgggaggtggatgttgcagtgagctgagatcacaccattgcactctagcctgggcgacaaagtgagactgtgtctcaaaaaaaaaaaaaaaaatcataataatccatataacaaactcccatgacacaagtttacctatataacgaatctgcacattttcccctgaacttaaaagttaattttttttttttgagatggagtctcgttctgtcacccaggctggagtgcggtggtggggtctcgactcactgcaagctccgcctcccgggtttaagcgattttcctgcctcagcctcccaagtagctgagattacaggcacctgccgctatgcccggctaattttttgtatttttagtagagacgcggtttcaccatgttggccaggctagtctcaaacccctgacctcgtgatccacccgcctcggcctcccaaagcgctgggattgcaggcgtgagccaccgcacccggccaaaagttaaaattttaaaaaaagaaaaacaacagccaggggttatgtctcgagaccatccacagggggataaaaaaatgtcttctctaaattgcaacaaaaaatagacaatcatgaacaaccccagtcataaaatcatcatctccgtgatcaccaccagaccatcagcagccaaccaaccccctaaaacagctccggctttacagttcttgggtctgtctgagagagacctcaatgcatgcatgttccaaaccaagagaacccgaaggtcacttctgaagtcacatcctctatccacccgccaggcaaggccaaaacaaacaggagctgataagccggctctattctgagtagagaagggtcagcttatcacccagccggccctgccctaaatggaaagacacgtccctctccttggcccagagacgggaatgtgttcaacagcacagaaaaataaaaaaatgaaagaaagaaataaaatgactccaagtagagttcattccgttagaatggagttatccagcctcagcactgtggatacttgggactgcataattctttgcatagggaccattctatgtgcatgggaggacattgaatggcaccccggcctctaccatcccgattccgatagcagctacaccccagttgtgacagagtctcgctctgtctccaggctggagtgcagtggtgcgatctcggctcactgcaacctccacctcctaggttcaagtgattctcctgcctcagcctcccgagtagctgggattacaggcacgtgccaccatgcccagctcgagagcagcctggccaacacggtgaaaccccgcctctactaaaaatacaaaagttatctgggcatggtggcgggcgccttcatcccagctacttggaggctgacgaactagagattcgtcatacttttttgacttttacccattaatagatcttgctcatttttcaggaaaagcatagaaaacaagacttagagtgttacttttaaaaatggtatattattattattattattattattatgtaaattactttttttgagacagggtcttgctcttttgcccaggctggagtacagtggtgccatctcggctcactgcaacctccgcctcctgggctcaaatgattctcctgcctcaccctcccaagtagctgggatgacaggcgcccgccaccatgcccagataacttttgtatttttagtagaggcggggtttcaccgtgttggccaggctgctctcgagctgggcatggtggcacgtgcctgtaatcccagctactcgggagggtgaggcaggagaatcatttgagcccaggaggcggaggttgcagtgagccgagatggcaccactgtactccagcctgggcaaaagagcaagaccctgtctcaaaaaaagtaatttacataataataataataataataataatataccattttttaaaagtaacactctaagtcttgttttctatgcaatgacatggaaaaatgagcaagatctattaatgggttaaaagtgcaaaaaagtataaagcgtgatcccattttcacaaaatgtgggtattatatatttatttgggtgtagataaagaacataaggcaatacatatgtagttgtctgtgtgtgtgtttatagcattctaggaggatatacaaatattcatagtggttgagatcactacaggagacttccacgttctacatttttgtgtcatttctttttaaaatgtgtattgctaaggctgggcatggtggcttgcacctgtaatcctaacgcttggggtggtcgaggtgggcagatcacgtgaggccaggagtttgagaccagcctggccaacatggtgaaaccctaactctactaacaatacagaaattagccgggtgtggtggcaggtgcctgtaatcccaactactcgcgaggctgaggcatgagaatcacttgaacccaggaggcggaggttgcggtgagccgagatcacaccactgcactccagcctgggcgacagagcgagactctgtctcaaaatatgtgtgtgtgtgtgtgtgtgtgtgtgtgtgtgtgtataatgtgtatatatataatgtatatatctatatagtattgcttttttcaatacagcaattttttaaatttttacttgtggcaaatcacacataacataaaatgtatcattgtaactattattcagtgcacagttcagtggcactaagtgcattcacatggctgtccagccatcaccactatcatctccagaacgttctcatcttcccaaactgaaactctgtctccatgagacactcactccccatcccccctccccagcccctggcacccactgtcctactttctatctccatgaatctgatgactctagggacctcatgtaagtggaggaaggggatatttgaaaaacctcagaatcatcattagtgatttgcgggttccagctatacacgggagatctcagagaggcaaactaatcctatggaataaaggagtgcccctttccatcttctagagagatgggaaccagggatgaagattccaagaatcccgacagaggccagaaacaatggtcatgttcctgaattgattgtttcttgctttttgggaagggaggatgaaagaaaccaggcccaccatgccccagagcccaggccaatttaggataggagtgcagcttccacatggaatcttggcacaatctggacatcctggggtccaaaccctctttgtgggcagggaatcagaggcactgtcccagttggcatggggttggggtgctctcgagcagccagagagacctggacaaggtttcctggccaggcatggtgactcacacctgtaatcccagcactttgggaggccgaggcgggtggatgacttgaggtcaggagttcgagaccagcctggccaacatagtgaaaccccatctctactaaaaatacaaaacattaaccgagtgtggtggtgggcgcctgtaatcccagctacccaagaggctgaggcagaagcattgcttgagcccaggaggtggaggttgcagtgagctgagatcgcgccactgcactccagcctgggtgacaaagtgagactccatcacacacacacacacacacacacaaaaaggttttctctctctgagcctcagtttcaacatctgtaaaatggcagtatcctaacagggcccacaaaaccacaatctataaaagactgataattggctttcaccaaaattcaaactcatgctattcaaaagataccagtgggaaaatgaaaaagcaagcacagatcgagaaaaaatatttgcaaagcatgtatccccacaaagggcatggatattaaacacgtaaagaactcttacaactcaacagtaagaggacaaatctggccaggcgtggtgggtcacgtctgtaatcccagcacttcaggaggcagaggtgggaggaacgttttagctcaggggttcaagaccagccaggacaacataacaagacctcatctctacctcgctctgtctccaggctggagtgcagtggtgtgaacttggctcaccacaacctccacctcctgggttcaagcaattctcctaacatttaaaaaaaaattgtttttaattagccaggtgtagtagtgcatgcctgtagtgccagctactcagaaggctgaggcagggggatcccttgagcccaggaggtcgaggctgccatgagctgtgattgtgccactgcactccagcctaggggacagagcaagaccctgtctcaaaaagaagaggaagaagaagaggaagagggacaggaacaggaacaggaagaggaggaggaggaggagaacaaatctaatattgttgacaatctagttttttttaacgtgcaaaagatttgaacaggcacttccccaacgaagatatagagatggcaaataaacacccgaaaaggtgtttaccatcattattcattaagaaaaaacaaattaaacccacaattgagataccactataagcctactagaatggctaagactaaaaataacactatcaactgctgtcaaggatgtggagaaactggaactcccatacacagctaaggggaatgtacaatgatacaaccactttggaagcactttggtggtttcttgagaagttacacacacacttactgtacaaatcaaccattccaatcttgattgtcgacctatgacaggtaaaagtatatatccatacaaagatttgcaggtgaatactcatagctccatttatattcaccaacaaataaaagcaaatccaatgtccatcaacaggagaataaataaacatactatggtatatttgaacaatggaacattattacttaaccattaaaaaagagaataggccaggcatggtggctcatgcctgtaatcgcagcactttgggaggccaaggcgggcagatcacttgaggtcaggagttcaagaccagcctgttcaacatagtgaaaccctgtctctattaaagatacaaaaattagccagacttggtggcatgcccttagtcccagctactcaggaggctgaggcagaagaattgcttaaacctgggaggtggaggttgcagtgagccaagatcgtgccactgcactccagcccgggcaacacagtgagaccctgcttcaaaaaatatgtatatataaattaaaaaaagagaacaaactatggacaccaacaacagcatggataaatctcaaaatcactatgttgagtgagcatactgtatgctcagacaaaaattagcacatgcaccttgattctatttatatgaaatactagaaaatgcaggctgaaatgtaatggcacgatcttggctcactatcacctccgcctcccgggttcaagcgattctcttgcctcagcctcttgagtacctgggattacaggcatgcaccaccacaactggctaatttttgtatctttagtagagacgggacttcaccatgttgcccaggctggtctcaaacccctgaactcaggtgatccgcccgcctcggcctcccagagtgctgggattacaggcatgagccaccgctcccagcctggttcacttctctccaaatccttcatgtcccacctgtaccaacctgaggcagctgcctcctccttgatggcctagtgtccactcctgccccctagagtccattctcatcactacagccacggaattctctttgttttaagtacataataatccatggggtgctcctcccattactgggctgggaaagccaggtcctggagttggcgctagaaaatggtccctgccctcttggaggttacggttgaatcaaacaactacacaaataaatatactcttacaaatggaagtctgtaccattcactggtacattcgaccctatcatactggtgcttctttctaaaactcagctggcactccagttctcttttgagtagaaaataaaaaagaaaacaatttttaaataaagtaaaacacagctggtctttcattcctctgccactgtcagctatttcaaccaaaaagaacctctcctcctggaaaactcttattcacccgtcaaaacccagcttaaagtttacttcccttgacccacttttctactacatctcagaaaatgagatcttcctttcactgtgatactatggaagtcaataaacctctgaagcattcaactcaagaagtcctagagaaataagctgagaaaggaatttgtcctgggtaacaaaagtggaactttatccattaaaacacataaaaacgctagaataaagaaaaaaatttgggaaatagaatttgttttctttttctgtttcttgaataaactctagccagtttattcaagaaacagaaaaagaaaacaaattcaatttgccacaacagaaaggtggctataaacgcagatttagagttttttaaaataaaagagtatgatatacaactctatgctgaaatttaaaaaatctcaatgaaactgagctttctgtaaacatgtaaattatcaaaattaattcaagaaggaatagaggtactgaatgcataactaaataatgacgaaagaaactaaagatattatgaaaaataacctccaaaaaggtcaatcccaaatggtttatggaatcatttaaccttcaaaagttcaagaaatagataaagatttctaaggtttatggactcattaaacttcaaaagttcaagaaatagataaagattcctaaaatagatgagaaatttcctaatcattctataaacagctcaatcctggtacaaaacctgactatctaccaaaaaatttttaagaccaagttctctgtctctctttctgtctctctctctcatagatacacacacacacacacacacacacacacacacacacgcagctaattaaataaaactaggttcactaactctttttttttgaaacgggatctcactctgctgctgaggctggagtgcagtggttcgatcgtagctcatagcagcctccacctcccgggctcaagcgatcctcccacatcagcctcccaagtaactgggactacgggcacacaccaccatgcccggctaaggttcacagactcttttcgataattctgaaaacctaaatgctctgggcacaacaaatatttggcataaatttggcaccaaaactaagttggtaaccaacttcactaaaagtgatattgtctatttatattatttatgacacctatatgaatattcatggattttctctgctgaaatattaatgtgcttgattatgaggtccccctatatacaccataagtggtgttaggtagtaacacactatatgcactctattgaatatatgtgtgtattaaaataataaatgatatataattaataaattataataaataattaagaaaaataattaacaaaaattattaataaataataaaactacatccgagtttatggccacctttctgttgtttagataattgaatttttctttttctgtttcttgaatagactttatttaagaccctagaggtctataccaggaacacatgtatgaatcaatgtaggcagcaatgtgttggaactggctcagaatgggtcacactggccaatgggcagcatctcttcccaacctacccttagtgccatcatcttgggtagcttgaatcacccacagtggaagtatttacaccactggaattggcaaatgctacaaatttggaactctctttttttccattggccagcaccttcttaacactgggaaatcttttaaataaaactcactgtctgtaggtaaaagaaaaaaaaatagtgcttgttcatctccaaagaagtcaaacagttgttagataaaatctcttttttttttttttttgagatgaagtctcactctgttgcccaggctggagtgtaatggtaccatctcggctcactgcaaactccaccttctggattcaagcgattcttgtgcctcaacctcccaagtagctgggattacaggcgcgtgctaccacgcctggctaatttttttttttttttagtacagacagggttttgccatgttggccaggctggtctcaaactcctgaccttatgatccgcccacctcggcctcccaaagtgctgagattataggcatgagccacactgctcagccattgtttgataaaatctttatccatttctgatataaaagtttagtaaattagtagtgggaggatatttttattgtctagtgggggcagtatagcccaggtaaacaccggagttctattgcctgtgtttaaattctgattcttccactttctggtttttcatgggttctctgagcctatgctttctcctatgcacatgaaataatattagtacctacctctgaaggctatctgcaggaattaagtgaaataatttctgtaaagtgcttagaaaaatgcctgacgaatattaatagtaagaacctagtaaatggtagctagtgctatgaattgttaaatataggaaaagattatattttctggataataagtggttctacctcaatcactgcatcatgtttaacaaggagtccgtgtgcagtggctcatgcctataatcccagtacgttgggaggctgaggcgggcagactgcttgaggtcaggaattcgagacctgcctgggcaacatggcgaaaccctgtctctactaaaaatacaaaaattagccgggagtggtggtgtgtacctgtagtcacagctacttgggaggctgaggcaggagaatgttttgaactggggagatggaggctgcagtgagctgagatcatgccgctgcactccagcctgggtgacagaccgacactacatctcaaaaaaataaaaataaaaataaataacaagggggctgggtgtggtggctcacgcctgtaatcccagcactttgggaggctgaggtgggcagatctcttgaagtcaggagtttgagaccagcctggccaacatagtaaaaccccgtctctactaaaaatataaaaaaaattagccaggcatggtggtatgcgcctgtaatcccagctactcaggaggctgaggctggagaaccacttgaacccagtaggtggaggttgcagtgaaccaagatcatgccactccactccagcctgggtgacaaagcgacactctgtcttaaaaaaataataataaaaataaataacaaggaaacacaagctttcttgttacaattagggaagtaatatgttgtcattattagaatttctgatttcatcagttaacatttagatgtcctgaccagcatggtatagcacacacacacaaaaagaaatagtagtactaagagaaaagggcctcagataatttttatttaccgataattaacctatttgccctagaaaacctagctgaaaaactattcaagttaacaggaatttagaaagacaacaaggtacaaaatacttaaatattaatagctttctgatagactacccataatcagaaaatataatggggaaatgaactattttataatagcagcccaaaatatgtataaactaggaatagaattgataataattgtataagacttatatgaatgaaatcacaaaattttaaggaatctaagaaactaaacaaataaatattcctggttgggaagaatattttgaagctatcactatgatacagacaagaagagagagagattaaaaagaaaagaacagaaaatccttaagcagaccctaatatggataactatttgtatttataaatgaacaactttaaatcagaatgcaaatagctacttattcaataaatgggtcttggacaactgagtaaacatttggaagaaaataactttgaccttcatgtcaacccatacaaccaaataaatactatatggataaaaaaaaaaagttaagtgtagaaaatttccaaaaacacgctgctaaaagaatacttaccaacggtataaatcacaaaggaataggctgattaatttgattagatagaatttttaagcttctaggggccagaaaccacgttcaaaatgttagaagagaaaaacaagaaaagaatatttgaaacatatttgccaaaggacactttatatataagaaatcttagaaagcaagctgggagcagtggttcacacctgtaatcccagcactttgggaggccgaggcaggtggatgacttgaggtcaggagttcgagaccagcctagccaacatggtgaaacccaatctctactaaaaacacaaaaattagccaggcgtgatggctcgtgcctgtaattccagctacttgggaggctgaggcacgagaatcactcgaaccagccatttcttgtttcctcatttccaaactccacaagcctgagacagaaaaagcatgcactttagactgactaccttgagattcaaatcttggctcttccacttttcagctctgtgactgtgactaggaatcatgtttcatctctcagagtctctgtttcctcattgtgttgttggaggaatgatagcaatggatgaaatattgaatcatgtgcctggacataattattgcattattgttgctactcctacctaccatcataatcatcaccaccatcattactgtcaccatcaccatctccaccactataatcaccaacatcaccaacatcaatatcaccatcattgtcatcaccatcatcaccatcaccattgccatctccatcatcatcatcaccatcatcatcaccactgtcatcaccaccatcaccattaccgtcaccatcaccatttccatcattataatcatcaacatcaatatcaccatcattgtcatcaccatcatgatcaccaccatcatcaccaccatcatcactatgatcaccatcatcatcttcattatcatcatcaccaccatcatcatatcaccattatcatctccactgccattatcaccatcgccacagtcaatatcatcatcattgtcatcaccgccatcatcattactatcaccgtcatcatctccatcaccattatcaccagcatcatcaccatcaacaccatcgtcattatcaccatcatcatcaccaccattataatcatcatcaatatcaccatcaccatcataatcaccatcattattaccactgccattatcataatcattatcatcactgtggattactatcatcatcaccatcattaacttcatcatcaccatcatcactatcataatcatcaatatcatcaccatcaccattatcaccatcaccaccaccaacatcattattataattatcattcttgttgctgttattatgttctgtcattaagttcataatgatccagtttgtgataagatgacacactagtgtgggctgctagcttactccctacaaaacgaacacaggagagagagggaagcaaggcattgagggattaatataaaaaccatgagaaaccctgctggtgaacaggtgcatgtgtctggggggccacagtagatcataggacaggagggaggtgggaaaaaggagatttacattccgtttgtgcctttcccctttattgtcctgggagggtcagtgtttgttccatgtctcaggtgggattctttggaagcagacacagaaaaagagttttaggtgcaagatatttattagaggccaacacctatgaaaggaagggagaggaagcagaatcatcagagagggaaatcacagtgcatggtagattctcaacaaagatggttgaacgaataaatacttgaactaatggagttatatgcccagagtggggcagttaacttccatttcttccttccatgaaggtttttttaggtgtgcacttaataataaataatagtgaatatcatttgagtgcacacacaccagacactgttttctaagtactttacatgggtttgctctgaagtaggaatgattatcattggccaggcgcagtgactcacacctgtaatcccagctctttgggaggccaaggtgggtggatcacttgagtccaggagttcaagaccagcctggccaacatggtgaaaaaatacaaaaaaatagccaggcagggtggtacatgcctgtaatcccagctacttgagaggctgaggcacaagaatcgcttaaacccagggagtggagtttgcagtgagccaaggtcgagccactgcactccagcctgggcaacagagcgagactctgtctcaaaaaaaaaaaaaggctgggtgcagtggctcacgcctataatcccagcactttgggaggccaagaagggcagatcacttgaggtcaggagttcaagaccagcctggccaacatggtgaaaccctgtctctactaaaaatacaaaaatttagctaggcgtggtggcatatgcctgtaattccagctactcgggaggctgaggcgaatggcatgaacccgggaggcagagcttgcagtgagctgagatcgccccactgcactccagcctgggcgacagagcgagactccctctcaaaaaaaaagaaaaaaaagaaagaaattagccaggcatggtggctcatgcctataatcccagctactcaggaggctggggcaggagaatcacttgaacctgggaggtggaggttatagtgagctgagatcacgccattgcacttcagcctgggcaacaagagccagactctgtttaaaaaaaaaaaaatatcatcatacccagtgaatacatcagacaaaggaggcacagatgttaagcaactttcccacatgagtggtaagtagaggagcatggaacgtggctggaaataaactggacaggttcctgattgtacaagtttccgttccagctgcagagagagaacaatgaataaatcccagtaacaatgaataaagtcaagaagtgtcatgagagtagaataaagaaagtagaggggtggggggcatgtggagggaggcctgcctgaggtgacttgtgacttcaagtctagagaatgagaaggggccatccgtgaagatcccggaagcagaggggacctggaagagagaacgctgagcagagagaacagcatgtgcaaagtcccggaggctggagagaggtctgtctgaaggacgaaaaggcagcctgtgtgttcgatttgttgggaggaagatataaagcagtgttcataacttcttagtcctgggcctggcactcagcccacactgactaaatgcaacaattgttacaacttcattctaagaggtgggcgcctccgtagctgccctctggggctaagctttgggaagtcccctagccttcggatgtgaatcgtctgccgtgggaacctctcccaggtctggctcaggaaagcttgggaaggtcctaaccggtcagcgagtcattctttctcacgtcctcaaacacagccctggggtcacccccacctaccttccaggaagagggctggggattcagcacccctcccattctcctaagaaacctctgtcagatgacagctgactgcttttttttttttttaaacacaatagtcacattggagaagggaaaaactaaaaaaaaagaaagtgctcaaaagtcatttttatccaaaatatttgtatgtattaactatatattttatgcacactgcaatgactgctgctcaaggcagggttcttaagaaactgaagggccagtcatggtagttcaccactgtaaccccagcactttgggaggccgaggcaggtggatcacttgaggtcaggagttcaagaccagcctgatcaacatggtgaaaccccgtctctactaaaaatacaaaaattagccaggcgtggtggtgcgcacctgtaatcccagccactagggaggctgaggtgggaggatcgcttgaggctgggaggcagaggctgcagtgagctgagatcatgctactgcactccagcctgggcaacagaatgagaccttgtctcaaaaaaagaaaaagaaagaaagaaagaaactgaggccatttatattttaatggatgtttgtgcctgctaggggtagaaacccctgaatggtggagcgaaggcatttaaactgaactccccactgtgggaagcatcacaagacccaagtcccgggctgtgaggttggggaagggctattctggttgacctgaaaatatgactgcaattttgtctgattttgttaggaagtggaatctacctctcagcccttgaatctgggttggttttgtgattttatgaattggtttgactggtagaacctgtgttgtatgaatgacagcctgggagataggaaaggagtgttggggagggagagaggcagagagagggagatagatagatagaattatagatagatggatgcatagatgatgatgatgatagatagatagatagatagatagatagatagatagatagatagatagatagatagatagacagacagacagacagagccaggcacagtggctcaggcctgtaatcctttgggaggcaaaggtgggagaatcccttgagtccaggagtttgagaccagtctgggcaacatagtgagaacctgtccctacaaaaaaataaaaaattagctgtgtgtggtggtatgcatctgtggtctcagctacttgagaggctgaggtgggaggataacttaagcttgaaaggttgaggctacactaggctatgatggcaccactgcactcagcctgggcaagacagcgcaagaccctgtctcaaaaaaaaaaatagatacatactacgtagatagatatatagatagttagagtcgtaggtagatggatggatggatggatggatggatggatgatgtattcgtccattctcatattgctataaagaaatacctgagactgggtaatttataaagaaaagaggtttaactggctcacggttctgcaggctgtacaggaagcagggtgctggcttctggggcgacctcagggaacttacaatcatggcagaaggtgaagaaggagcaggcacgtcttacatggcaggaacaggagcaagagagagtgaggggaggggagaggtgtcacacacttttaaatgacagagtctcacgagaacttattgtcacactgtcacaagaatagcacaaaggggatggtgttaaagccagagatcctcaacctttttggcaccagggaccagtttcatggaagacagttggaaggtggcggttccaggatgattcaagaacattacatttactgtgcactatgatgcactgttgttatattattaccacattgtaatacataatgaaattattatacaactaggccggacccaaggcggctcatgcctgtaatcccagcactgtgggaggctgaggcgggcagatctcttgaggccaggagtgtgagactagcctggccaacatggtgaaaccctgtttctactaaaaaaaaaaaaaaaaaaaaaaaaaaaaaattagccgggcacagtggtgcaagcctacagtcctagctacccaggagtttgaggcgggagaatcacttgaaccctggaggcggaggtggccgtgagctgagatggtgccactgcgctccagcctgggtgacagagtgagacgctgtctcaaaaataaacgtataaataaaataaagacgactcagaaaacaaaatgggggaggtatggaggggagcagagagatagagagaggtgaagtcccttgagggagtactgtttgagcagactaaaggataaagagccagatgtgcctccagggtgacatccacacacctgtccagatgacaaacacaggttctcagcccccaccgtccacctaggattcctgagccctctcctgctgacacctggcagggtgctgagcccatgagctcatgggaagagaggagcccatagccatgaccccttgcccacccgctggacaccctgcccttcctctggggttcccagatgccctggcacagtgctacctggaggaaaaggaagagcgtcagccgggggcagcctctgccttgcgggccagctgctgggatgggagacctccttcccagccctcccccttccagggcaaccagaggagcagctggaaagttccaggctcaggaaatgcaaatagatgaatggagggaagtggacagggacactacacccatagacttgaggctgtcagtcaaaagtgctgaccctggagcctgtcccagaccctgtccgctggggagtcaggctgagagctgggtggcattctcgctccccatccacccatatctacacaaagtccagctcattttgcctctcgaattcccccccgagtcacccacttttctccctcctatggctgggccactgtcctgtcttcctgaatgacagcattgccaccttgccagcttccaggattataccctctaaccattccttccatgcccagttaaagggagctttctgaaacaaagagcagactttgcctcccctccgcataaaacttcccatgtctccccattgccttagggataaaagctaaagctatgccattggacccagacacaatggcctctgtctctagcttcccccattatagccactttcccctttggttctccttgctgtggatgagtgcaatcacctgtggccctgtgcttgtcccaggtccttcacatccttcaggtatgtgctgggcactgcttcctgaggaagcctccctggacttccaagtctggggctcaggggctgctcacctgggctccaactatcacacctgccatattgctttgtgcttactgaataatgcagtgtgggaagggaactgctgtggcatggccctgtgtgccctgatgagtcttctgcaggtgcaagtggtgagcagaggttgtccactgcaccatctgtgtgagttcaggtcactggcagagacaggcagggttagcaatacgggtgcccggcccctcggccaacgtgcctaacacaggttcccagaggctgtgtctctcaacatgccgttaacaaagcagatgttctaaggggttctgcatgctgcagcctctgggggacagtgtgtcacagagccttgcctcactgagcctcagcttcctcatctacagaacggggccaataaagccaacagggccttcctccttggatggttgtgaagattgcatgagattaaataaactacatagaaagtgctcagagaggggtgacccctcttttatgattcataaccagtgccagaagccacgccaggacacatcttgccattggaagtatgtaaagtaatggcactgtgcttctgtggacatctcattacgagaatgttcagttcttgggttatattaagatgcggttttcctgttgaagcctctaaagtcccttgtggtttctctggggtccaacagcctggatgcgaaaaagaaagagcccagcctgctgccccaccccgtgttactatgagaattggggaaccagcccctggggacacagatgctatcacaaagagtccctgaattggcttgccacatttaacggataaatatataagatactcaggttcctatatttgatctggcaaccctatttccagaagtgtgctaggtactctcacttgtctgaataagtaacatctactgcatatatatagatctatttttctttttcttttcttttctttttttgagacaggatctcactctattgtccaggctggagtgcagtggggcaatcatagctcactgcagtgtccacctcccaggcttaaaggatcctcccatctcagtctcctgagtagctaggtcaacaggtgggcaccaccatgcctggctaatttctaaattttttgtagagacaggatcttgctatgctgcccaggctgatcttgaactcccgggctgaattgattctcctgcctcagcctcccaaagtgctgggattacaagcatgagccactgtgcccagcctaattatctaatctaagctttttgcctacacacacacacacacacacacacacacacacacacacacacacggagagagagagacagagacagagagggagagaactgaaagaggaccaaaagaagaataaagaagaacagtccagctgggtgcagtggctcatgcctgtaatcccagcactttgagaggccgaggctggaggatcacttgaggtcaggagtttgagaccagcctggccaacacggcgaaaccccgtctctactaaaaacacaaaaattagctgggcatggtggcatgcgcctgtaattccagctactcaggaagctgaggcaggagaatcacttgaaccagggaggcagaggttgcagtgagccgagatcgtgctattgcacttcagcctgggtgacagacgaagactctatcacaaaaaaagaaaagacaaaagaaacagttaaaatgtttcttacaacgctaaatatacatttgtcatagcacccagaaattctattcctatgtattttaccaagataaatgaaagcatattcacattgaagtcttgacataaatgtttgtagtgatattattcataattgccaagaaaatatacaatttggccgggtgcagtggctcacgcctgtaatcccagcactttgggaggccaaggtgggaggaccacgaggtcaagagattgagaccatcctggccaacatggtgaaaacctgtctttaaaaatacaaaaattaactgggcgtggtggcacgcacttgtagtcccagctactcgggaggctgaggcaggagaatcgcttgaatctgggaggcagaggttgcagtgagccgagattgtgccactgctgggagacagagactccctctcaaagaaaaataaaaaagaaagaaagaaaaagaaatgccacttgaggtggccacctgttgtccagctactcaggaggctaaggtgggaagatcgcttaagcccctgagaggttgaggttaccgtgggctgaaattgtgccattgcactccagcctgggtgacagagggagaccctgtcccccgacccccccaaaaaaaagaagaaagaaaagaaaagaaaaaagaaaatattagaaatcatgtagacaaattaagactgtagaatttcataaatacatgttctaatttccaatataatttcaactacagtaagatgataatcagatacattccttttggtggttgctattgccgcactcttagatatgaagtgaacagctccctgaaattcgcactctctgggcttctgggaactatattttcatcattctttggctcccgtctgtgcttttctgagacatgcctgttcacaccctttctttctctttttttcttttcttgctttttcttcttctttttttttttttgagacagagtctccctctgttgcccaggctggagtgcaatggcgcgatctcagctcactgacgcaacctctgcctcccaggttcaagcgattctcctgcctcagcctcccaagtagctgggtctgtaggtgcccaccacctgcccagctaattttcaccatgttggccagtctggtctcgaactcctgacctcaactgatccacctgcctcagcctcccaaagtgctgggattacaggcatgagccaccaagcccggccccaaattcttaattttctatttctgttgtgtttttttcttatcaatgtgtgaaatctctttgcatataaaggtaccaacccttctcaggcaaccaattcatctttctttattgcttttgtatatacttccctgataatttataaaattattctgttagttatatttatttttattataagatttttaacagatgtttatatagttttttgtttgtttcgttttgttttgttctgttttgtttttgagacagggtcttgttctgtcacccaggctggagtgtggtggtgagatctcagctcactgaaacctctgccaccagggttcaagtgattctcctgcctcagccttccgagtagctgcaattataggtgcccaccaccacacccagttaatttttgtatttttagtagagacaaggtttctgcatgttggccaggctggtctctaactcctggcctcaagtgatccacctgcctcagcctccccaagtgctgggattacaggcatcagccactgcacccggccacgtttatatagatttttatgtattaagtatttctgtggtttcattcatagcttctgggttttctgtcttagttaaaacacacacacaacaatttcaaaaaaagcatgttttcaaccctcaattgtaaaaatagccttgtaaattccttctatgatctgtattggtttattgttcacatttcatctttaacccaactgaaattatgttgttttctgcagcacaggaatatttcactctgccacgtctctgtcaaaagtgggagaaaaggccaggtgtggtgactcacatttgtaatcccggcactttgggaggccgaggaggaaggatcacttgaggccaggagtttgagaccagcctggccaacacagtgagactactccaagaaaaaaataagcgtggtagaaggaagggcaaacccgtgtctcacaccccatggccctcactaactcaggctgctgcctggcccctgtaagccttccggctttccacaagggtcggttttttttcctgttttgctttctgtggtctttctggccagaggagaagccatggggaagtgctgcccccacgtggccatctccatgatagcagctaaggctggaagaaaaaggctttttgttgttgttgtttgagatggagtcactaggctggattgcagtggtacgatcttggctcactgctatctctggctcccaggttcaagcgattctcctgcctcagtctcccgagtagctgagactacaggcgtgtgctaccatgcccggctaatttttggatttttaatagagacggggtttcaccatattggccaggctggccttgaactcctgacctcacgatccgcctgcctcggcctcccagagtgctaggattacaggcatgagccaccgcacctggccaaggcatcttttaaagctgaaagcaaaataggttcacaggcccctgcttaaaaccctccaggggcggctgatgcctgtaattccagcattttgggaggccgaggtgggaggatcacttgagcccaggagtttgagatcagcctgagcaatatagcgagaccctgtctctacaaaaaataaaataaggccgggcagggtgactcatgcctgtaatcccagcactttgggaagccgaggtgggtggatcacctgaggtcaagagttcaaaaccagcctgaccaacatggtgaaaccccatctccactaaaaatacaaaaaaaaaaaaaaattagccacgtattgtggtacatgcctgtaatcccagctacttgggaggctgaggcaggagaatctcttgaacccaggagccggaggttgcaatgagccaagactgcgccattgcactccagactgggcaatagggtaagactctgtctcaaaaggacaaaaataaaataaaatagcaaggcgcggtgttgtatgcctgtggtcgcagctactccagaggatgaggagggaggctggcttgagcttgggaagtcgaggctgcagtgagctatgatcacaccactgtactccagcctgggtgacagaatgagaccctgtctctcagaaaacaagaataaaaactttatttacaaaagtaagcattgggttaaacttggcctaaaggttatactttgctgacctgtgttctattgcatatattctgctggacgtgatggctcacatctgcaatctcagcactttgggaggccgaggcaggtggatcacttgaggccaggagtttgaggtcagtctggccaacatggtgaaactctgtttctactaaatatacaaaaattatccaggtgtggtggcacatgcctataatccccagctattcgggcggctgaggcaggagaatcgcttgaacccgggatgcggaggttgcagtgcagtgagccgagatcacgccactgcactccagcctgggaaacacagtgagactctgtctcagaaacaaacaaacaacaccacaaaagaagaaggaaggaaggaaggaaggaaggaaggaaggaaaaaaaatctctccagcggtacatacccaaatgttgaaagcagggactcaaaacaaatgtttatacacccatgttcttttttttttttttttgagatggagtctcgctctgtcgcccaggctggagtgcagtggcgcgatctcggctcactgcaacctccgcctcccgggttcaagcaattctcctgccttagcctcccaagtagctgggactacaggcgagcgccaccacgcccagctaatttttgtacttttagtagagacggggtttcaccatgttggccagaatggtctcgatctcttgacctcgtgatccacccgccttggcctcccaaagtgctgggattacaggcgtgagccaccacgcccagcctatacacccatgttcttagcagcatgattcacaattaccaaaagatagaaataacccaattatccaccaatggaatatgattcagatgcaaaaagaaggaaattctgacacctgctgacatggatggaccttaaagacattacgctgggtgaaagaaaccaggcacagtaggacaaatcctgtgtgattccacttataggaggtccctaccgtcactagattgacagagacagaaagcagaatggtgggtgccaggggctggggagggagatggggagcgagggtttcatggggacagagtttcagtttggagatgagaaagtgctggagatgattgcacaacaatgcgaatgcatttaatgccactgaactgtgcacttagaaatggttaacaagggccaggggcggtggctcacgcccgtaatcccagcactttgggaggccgaggtgggtggatcacctgacatcagaagtttgagaccagcctggccaacatggtgaaaccctgtctctactgaaaatacaaaattagctgggcatggtggcaggtgcctgtaatcctagctacttgggaggctgaggcaggggaatcgcgtgaacccaggaggtggaggttgcagtgagcagagattgcgccattgcatcccagcctgagcaacaagagagaaactctgtctcaaaaaaaaaaaaaaaaaaaaaaaaaaggttaaaatgggctgggggcagtggctaatgcctgtaatcccaacactttgggaggctgagatgggaggattgcttgagtctaggagtttaagaccagcctgggcaacataatgagaccccttctgtacaaaaaataattaaaaattacccgctcatggtggcacgcacctgtagtcccagctactcgggaggctgaggcaggaggattgtttgagcctgggacattgaggctgcagtgagttgtgatcccaccactgcactccagtccaggtgacaaagaccctgtctcaaaaacaaacaaacaaacaaacaaaaacaaagggttaaaatatagaattaatcatgtcttttgcagcaatatgaatggaactgtaggctgttatcatcttaagtaaaacagttcagaaatagaaagtcaaataccgcatgttctcacttataagcgggaattaaatcatgtgtatacgtggtcatagtgcggaattttagacagtggagacccggaaggggtaaaggaggaagggcgggaggggtaagggatgagaaatgacttaatggctacaatgtacattacttgggcgatggttacactaaagcccaggcttcctgctgcgcaatctatccatgtaacaaagttgcctttatactccttaaatgtatacacattttaaaaatcattttttaaatttaaaaaaatggttaaggccaggcacggtggctcacgcctgtaatcccagtactttgagaggccgaggtgggcagatctcttgaggtcaggagttcgagaccagcctggccaacaggatgaaaccccatctctactaaaactacaaaacattagccaggtgtcgtggcaggtgcctgtaatcccagctactcaggaggctgaggcaggagaattgcttgaacctgggaggcgggggttgcggtgagccgagatcgtgccactgcactccagcctgggcagcagagcgagactccgtctcaaaaacaaacaaacaaaaaaggtaaaagggtaaatgttatgttatgtgtcttttcccaccaacgcaagcagtaaagggtagagcaggtggtggccctccctgcgggctggacggggtggtggaggggaaggaagggagccaggtgtgcacagccgaggggtggcctctgcattcggccttaaggccaatatcaggtgtccggggcgcagtggggacagaggccagggttcagagagtggggaagcgtggacaggaagtgtggacggtactcccaaacagcacagagtatttctacagcacagaaatatttcactctgctatgtctctatcaaaagtgggagaaaagggcaggtgcggtgtgtcgtatttgtaatcccagcactttgggtcctgtgacagtcctcctccgcctggctccagccacacctgcttccttctgttcctcaaacaccccaagctcagtcttgcctccaagcctttgccctggcagtttttaccacccagaataactttcccctagattttttttttctcactctatcacccaggtgggagtagggtggcacaatctcggctcactgcagcctctgcctcccagattcaagtaattctcctgcctctgtgtcccgagtagctgggattacagacagacgccaccacacccggctaatttttgtatttttagaagagatggggtttccccatgttggccaggctggtcttgaactactgacctcacgtgatccacccgcctcggcctcccaaagtgctgggattacaggcgtgagcccccacgcccagctagacattgatttatatgcctgacttcttctgagcttacagatctcagctcaaatggccttccctgaccttcccagctaaagcatcaacctcccccacccactctatcgcatcactctgtttacttcctgttgcggcaattcacagcacctgaatttatctcctaggtgtgtttcctgattcactgtttgcctcccccagctggagctcctgcagggcgggggtttgtgtctgtcttgttcaccgtgatcccacacctgccacagtgcctggcatacagtaggtgctcgataaatgcatgttgcctgaaagaaataatcaactggttacagaatgggtgtgtgcaaatctgtgtatatctgtgtctccttgtgttctgtgtgtgtctcgttggtgtgattctggggatggccccacctgtgtccccagggacaagcgcggcgctatgggccagtgagtgtttgtggtgagggctttccgggtctgtgtgttagtgattttgagtggtcccgtggcaaccggtgtgcaagtcagtgtctccagaggtgttctcagaggtggccagcatctgctcttttttgttgttgttgttttgtttttgtttgttgtttaagatggaatctcactctgttgcccaggctggagtgcagtggcatgatcttggctcacggcaacctccgcctcccgggttcaagccattctcctgcctcagcctcccgagtagctgggattacaggcacatgccaccacacccggctaatgtttatatttttagtagaaatgggttttcaccacgttggccaggctggactcaaactcccgacctcaggtgatccacctgcctcggcctcccaaagtgctgagattataggcatgagccaccgcgcctggccagcagcatctgctcgtgtgtgtgtgtgtgtgtgtgtgtgtgtgtgagtgttctgtgtgactgtggctgtgagtccacatgtgtgtcggggtgtttgttgtgtatgtgtgtctgcatgcccattctgcatgtccacatgacactgcatgctcctgtgtgaagttgtgcccatgagcacacgtgtctgtgtttgcgtatccttgtgtgtcctctgggtgtgtccttgagctttgtgttccaggagcctgcagccctgttgtgcagcgctgttgtgctctgttgtgcacgtgcatgtgtctcgtgtcctctgtgtgtggggtggctcctacatgtagttgtgcacacttgtatctgcctctgtgagtccctgtgcctatgtgtgaccatgtgtgaagtgtgattgtgcagtatcccaaaaccatctgtgtgcaccgctgtgcagtagtgtgctggtaaatgttgaacctctccagtggagagcactgatttatagcattgccagtcctcatggtgtaaatactctcgccacagccaatttcaagtgatgccaccgaacagtgagtcagaaagatatggacagcagcaaaccattatacagtatttctaccaaacaggttccatacacaaaagcaacatcaaaagcatagattatgaggccaggtgtggtggctcacacctgtaaccccagcacttccggaggctgaggtgggcgaatcctctgaggtccggagttcgagaccagcctggccaacatagtgaaatcccgtctctactaaaaatacaaaaattagcctggtgtggtgggggtcacctataatcccagctacctgggaggctgaggcaggagaatcacttgaacccaggaggcagaggttgcagtgagctgagattgcaccactgcactccagcccgggcaacagagcaagactccatctcaaaaaaaaaaaaaaaaaaaaaaaaaaaaaaaaaaggaaaaggaaaaaaagcatagattatggaaaatgcagcaaaaataatgttaaagtgattaatttaaatgtggtaaaataggcataacgtaaaatttaccattttaactttctttaaaaaaaatgggatttcactctgtcacccaggctggagtacggtggcacaattataggtcactgcagctttgaacacctgggctcaagtgagcctccccgcctcagcctccggagcggctgggactgcaggcaggcaccaccaaatgtggcgaagttttaaattttttgtagagtactcactccagtgacaggctgaagccagcccaagagccaagtttagtggagcatcatggctcatgcctgtaatcccagcactttgggaggccaaggcgggtggactgcttgagcccaggagtttgagaccagcctgggaaacataataaaatccctgtctctacaaaaaaaaaaaattaacttaggctgggcgccatgtctcgtgcctctaatcccagcactttgggaggccaaggtgggaggattgcttgagcccaggagttcgagaccagcctgggcaatatggtgagaccctgtctgtactaaaaatacaaaccaaaaaaaaatagccaggcgtggtgatgtgtgcctgtggtcccagctactcaggaggcggaggtgggaggatcacttgagcccaggggatggaggttgcaatgaaccaaaatcacccccactgcactccagcctggatgacagagtgagagcctgtctcaaaagaaaaattatatataaaaaattatatataaattatatataagtctatatataatccatatataattatatataaagtatatataaattatacataaattatctgtaaacaaaaaacttagccaggcatggtggcatgtgcctgtaatcccaactactcaggaggctgaagcagaaggatcacttgagcccaagagattgaggctgcagtgagctatgatttttccactgcactccagactggatgacagaatgagaccctatctctaaaaataaaataaacagttttttgttgttgttgttgttgttttctaaaaaaagccaaatctgagcatttcctatcaactccacactcggtgacatcacactggtaggtgaaatcggccatgctgggggtatttacaccaggagaattggcaatggctacaaatcggagaggtggttgttaaacgttaccagcacaccatgttgttccgccagcttccaggtacccatgtaacaatgtagccacgtgtgtttctgtctctctgtgtgtacccaccatgctggtgtgtgtctgggtgcctgagtctctacggatacacatgacctgcacgtccctatatgttgctgtctatacacccatgtgcctgggtgaggcccccacaccctgttcctcttcagcagttggttccacaggaagctgctggggtgggggttgaggacgctgggcctccctccagctccccacccctcctcctcaagacacctgcatgcgcagggctgaggggtgggagcagggctctctgcctccagaacccccatcctctgggctctttttaggcccctagattggcctgcagctgggagcagagtggcaagcatgcaggcaggcagttgagaaagaggaagtcgaggtgctattgggtcattctgtggttatcccaggctctacccagccagcggttcccttgggccagctcgaaacgctggccgtaggtcatgggagctgcaggagctgttagccaggctaggtgcctgcaggttgaagaactgagctctatctggtaagtacttatcctgggaagtggagagagatggacccatcgggacagagtggcagtggggtctgggaagtctagggggacagcgagcagacatacatcactgtttctctcccccttgcagtcaacttgcttcctgagtgggtgggggaagctgtttgacccttgcgttcattgtgcagagatctgtggtcataagaggtcaccccaggggacggggatccttgaggggctgctaggtaagaaaggagggtggaggccgggcgcggtggctcacacctgtaatcctagcactttgggaggctgaggagggcggatcacttgaggtcaagagttggagaccagcccggccaacatggtgaaaccccgtctctactaaaaatacaaaaattagccaggcgtggtggcgggcagctgtaatctcagctactcgggaggctgaggcaggagaatggcttgaacccgggaggtagaggttgaagtgagcctctcagtctcaaaacaaagaaaagaaaaagaaaagcaaagaaaggacgatagagctccttgtagccaaggccctcctgcgtggagacaggagacagagaatgaatgggggagctggggcaaaggctcaggtgccctttgcatcttaaactgcagattccgggccccccaagaacctccctgttgcagattctgaatccactgtcaaaacaaactcacacttaaggctgatggctgacaaccagccctgagaagggtcttgtcctgatctgaaatcatccagagagcacatccctccacccaggcagccttcctccaggtgagggttctcccccttgggagacatcccctgtctcctctcgtggccccttcttagggggacctcctgcaccaccgcctgcctgggactgggaggggtgggggaggaaggctgcggtttctgctgggcacacccagtctgttgtttcctgccagcccccaatgctgcagggcaggcttcaggcaccctgaggtctaggaaggtggccccagaaccaggagggagtgaattgagctagagtggacagctggggccagagaggatggagctaggaagtgacgctgggggctgatgctccaaggccaggtcacctgcagttctgagaaaagaacatgacaaccaaaggaggtcaggaaagggttgccctcataatcagccacatttcaactcccttgctgtgactgggagtcactctgggagggctgcttggtagaggcagccttttcattatgccttgaagaaccagtagatggcaactgcaaacacgtcggtgcttctggtctgggctgtctcccatgcctccctgggcatcccctagcccatgacaaagggatgggcatatgttgatgctcgatactgttgtagatgacatggtgactgtgttggacagctgggcgttcaaatcccagttccctggcctctatgtggccttgggcaaatgacttaactgctctgagctttcgtttgctcatctgttaaaaggctgttgagttttttggggtgggtgtgtgtgtgtgtgtgtgtgtgtgtgtgtgtgtgtgtgtgtgtgtgtgtgttggagatagaatcttgctctatcgcccaggctggagtacattggtgcaatctcagctcactgcaacctccgcctctcgggtttaagcaattctcctgcctcagcctcccaagtagctgggattacaggcacacgcctccatgcccagctaatttttgtatttttagtagagacagggtttcaccatattggttaggctggtcttgaactcctgacctcaggtgatctgcctgccttggcctcccaaagtgctgggattacaggcatgaaccacctcgctcagcctttatgaagtttggtctgtgagatcttagtgcagtgtctggcacgtaatagatcagaaaacattgtcagcctcacctatgccttcatactgaccttgtccccaggccttccttcctgagcagtcccaccatcttctgaaatgttctgggtcatacccatggtggatctcaatctgtaagcaagtctgctagagtggacttcttttgtttgtttgtttgtttgtttgtttgtttgttttgagatggagtcttgttctattgcccaggctggagtgcagtggcacgatctcggctcactgcaagctccacctcccgggttcacgccattctcctgcctcagcctcccaagtagctgggactacaggcgcccgccaccatgcccggctaattttatgtatttttaatagagacggggtttcaccgtgttagccaggatggtcttgatctcctgaccttgtgatccccccacctcagcctcccaaagtgctgggattacaggcatgacccactgtgcccagctagagtggacttcttaaggatcccatccagccatccctgtatcatatgctactgtattttctctctgcctctctctctctctcttttttttttttttttctgagacagagttgcccaggctggagtgcagtggcacagtctcagctcactgcaacctccacctcctgggttcaagcagttctcctgcctcagcctcctgagtagctgggattataaatgcataccaccacacctggctaattttagtagttttagtagagacagggtttcaccatgttacccaggctggtcttgaattcctgacctcaggtgatccacctgccttggcctcccaaagtgctgggattacagatgtaagccactgcacctggcctgttgtatttttaattctagcatctttatctcctgtagggctgttgctattgtctgtgtttcttcttgttttttggtcatgaggttctgtcttctagtatgcctggtagtctgattaaatgccaggccttgtttgtgaaaaactatagggataatttgtgtctctttatggtgtcattttcctccatagagcgtttatttttgctttgggcaggcagttagagaaaggaaagatcactttaatctgattgtgacctatgctgacttgaagatggattttgctctcggtgagggctagtctatgtctggtccctccttgctcctagggtgtagtcttttaggggtggcaatcacctcctctttttgggccctgaattccaatgtttatttccccaacataagattgctaagagctacattcaggttctcaggctttttctggtctgcctcccactcactcaagaactgtgttcaaatcaacaacttgtttgtgagggaaaagcattacattatgtccttctcactttcctaggtttccttttttttttttttttttttgagatggaatctcactctgtcacccaggctgtcgtgcagtggcatgatctgggctcactgcaagctccacctcccaggttcacgccattctcctgcctcagcctcccgagtagctgggaatacaggtgcctgccaccacgcccggctatttttttgtattttcagtagagacggggtttcacagtgttagccaggatggtctcgatctcctgacctcatgatccgcccacctcggcctcccaaagtgctggaattacaggtgtgagtcgccgtgcctggccttttttttttttttttttttttgacatagactcttgctctgtcatccaagctggagtgcagtggcatgatcttggctcatcacaacctctgcctcccaggttcaagcgattctcctgcctcagcctcctgaatagctgggattacaggcatccaccaccatgcctggctaattttgtatttttagtacagacggggtttcaccatgttggccaggctggtctcgaactcctgacctccagtgagttgcccacctcggcttcccaaagtgctgggattacaggtgtgagccaccgcgcctggcccctaggtttcctttctttccagggccgtgattcttccaactctgactgccaatgccttccaagcaagggtggtttttcactcttccaattttgtccagcttttctatttgttcttggtgggagaataaatctgcaataagctagcctgccatcattagaaatacatattccagctgggtgcagtggctcacgcctgtaatctcagcactttgggaggctgaggtggttggatcacctgaggtcaggagttcgagaccagcctggccaatatggcaaagccctatctctactaagaatacaaaaaattagccaggcatggtagcgggcgcctgtaatcccagctacttgagaggctgaggcaggagaatcacttgaacccgggaggcagaggttgcagtgagccgagattgcgccattgcattccagcctcagcaacaaaagtgaaactccatctcaaaaaaaaaaaagaaaaagaaaagaaaagaaaaagaaaaagaaatagatatccctgttgtatttttttaaagtgagatttagccaggtgtggtggctcacacctgtaatcccagtactttcggaggccgaggtgggaggatcacctgaggttaggagttcaagaccagtctggccaacatggcaaaaccctgcctctactacaaatacaaaaattagctgggcatggtggtgcacgcctgtgatcccagctactagggaggctgaggcaggagaatcgcttgaatctaggaggtggaggttggaggttgcagtgagctgagatcagccactgcactccagtctgggtgacagagcaagactctgtctaaaaaaaaaaaaaagaaagaaagaaaaagaaaagaaatagatatccctgttgtatttttaaagtgagatttggctgggtgccatggctcacgcctgtaatcccaaaactttggaggctgagccaggagggtcacttgaagctcggagtttgagaccagcctgggcaacatagaagaccccatccctacaaaaaagaaaaaagtaaaaaaaatagccaagtgtgatagcatgcatgtacattcccagctactcaggagtctgaggcaagaggattgcttgagccaacgggttcgaggctgcagtgagctatagatcatactactccagcctgggtaacagagtgagatcctgtctcaaaaataaaagttaaaaaataacaggctcatgcctgttatcccagcactttgggaggctgatttggggctgggggtgatttggggctgggaagtaatgtaaacaattgggagactgaaggagggagtcacacagcaagtacgtgctggaggagctgggatttgaagccaggatttgaagcagggatttttcagacacaaggagtgaagacgctgataaaggagcttccaccacgagggggcagcacctgcacggatgagcactcgttgacacacacacaccataccccacacttgggtacagagagaaaggtgatgtggctcaatgcctgcaatcccagcactttgcgaggccgcggcaggaggatcgcttgtgcctgggagttttgagaccagcctgggcaacatagtgagaccccagctctacaaaaaatacaaaacttagccagtgtggtggcacacacctgtagtcctagctactcaggaggctgaggccggaggatcccttgagaccgggagttggaggctgcagtgagctgtggtcacgccattgcactccagcctgggtgacagagcaagacccatctcaaaactaacaaacaacaaacaaaaaacagaaacagatgaagacacaaatatgtagaaacacagaaacccaggcggacaccaaaaccacctcatagatactagaaacagatctccccaagacacagatgagtcatgtagttaaatctgacctcacggataccaatgggcttcacacacacacacacacacacacacacacacacacacacacacacagacaatcacagagacacttttaaaactatctagataatcaaatacacccccacattgacaagctgatattcagaactcaccctgaaacacagaatcacaaacccaaaagcacgtgctctctacacaacatggaaatgcatcatcaaacccaccaagacgatggcacgcacacacacacaaacactcagacatccatgcacacccaggctccccgagggacccagtttgtacttgtatttccctaagattgtcttgtccagccagggtaagaggcctgtaagactgggtttaagggacagagggtgctaaagggcttggcttctcctcaaaccaggggtccctgggcccctgagctggaaaccccagcccccctgctgaagccccaggcttctatcagctgatgtatctggcagaccttggaggcagtctccgcccctcttactggcagccccatcctggcagggattcccaggccagctcacactcaagctctcacacgcacgcatggcccccatggctgactcggtgctcaaccactcctggccggccttctccaagctgtggctgaagcggtgggccttcaagagaggtaagcagctggcagtgaccagcgggagccatccacccaggtggggatcccaggacagcctgcccgccatcccccttcgagctttttcttggctgcagtacagactctgctggcatcggccctggattccatgacccctgattctccagggccccctggaattatcacagacttgtggggtccctcttgtttcagaggaaatgtctcccaagacttggccaggaatttgtctcgggcggtaaatttgcagaaagaaagtccgccctcttaactcagccgctgaactcctcaggggcagcccagcgatctcctgggggtcccagatgctgttggtttctggcccagctgcaggacaggaggctcagggcagaaacaaaaacggggggattagaggctctggggcacacacctccctccaacacacatacacacacacatcggctggtgctctctctctcaacccccagggtccccaggcctcaggtgacctctctggggactgataacagcctttattatgtcatcaaaggcctgagtgaactgttgttgcaaagagagacactttttctttttttttttttttctgagaccgagtctcattcggtcgccgaggctggagtgcagtggcgcgatctcagctcattactgcaaactctgcctccagggttcaattcattctcctgcctcagcctttcgggtagctggaattacaggtgccccccaccacacctggctaatttatatatttttcgtagagacggggtttcaccatgttgatcaggctggtctcgaactcctgaccgcaggtgatccacctgcctcggcctcccaaagtgctgggattataggtgtgagccagcgcgcccagccatcaaagagacacttcttaatgctcaagagtttagcccttgaagataaccagatgatgtcctggtacgtagggcatgagaggacagtgctggacaatatcataaaagctggtcatgcactcattgcctcatgggttttcttgtctccggctccccactgcccatatgagcgcctcctggtcaggccagccgcatcgcttagcctgcatgacttgttagtcacagccaccatcacctgcatgagccacgtacttgttcaaggtagcagtgagttttcatgaaagagggggccaatgtgaagattcgttagctcattcattccactgaccctccttgaaggctcattgtgtaccaggcactgtgccggggtcagggagcagatgggagtgccaggggacccaagggctggggttagggggagagaggatggcctgggaactgggatgcaatagaagagtaatcatcaggataaaagttgttggtggctgttgagctctcatgaagttgggctcagagaggttgagcgacttgctcgaggtcacacagcaagtatatgctggaggaaccgggatttgaagccgattctgtgtgaggccactttgatgtgttctgactgatgaacaaagctgccagtgtgggcagctggagtgcctggggagggtttttagatccaacggtggatggcgatcctgaagaatcagtgtatctgccatggattaccaaagtgtctgcctgtgacccaggtccctaagaagttctgtccctcttgtggctgctcagctcaccctgtctccctgcccaggcagttgaggctgggatttatatgctagcaggtgggggagtgagctgtgggaactgacagtgactcttaaacccttttatggctgatgctgtgggggctgatagtggaggaggctgcctgggactgaatccaggctgatggacagctccttggagagaagcatgggggtggggagcagggtgcatccccaacagagcccctttccctgaggcctcatttctcctctggcttagctcccctgggagagtgactcccttacagcgtgtctcctgtcatcagccttggaaagcagggaagaatggcctttttgtcaccctcttaagctctgtaattggctgtctgggcacctaataggaatttcccggggaaagggtgggattggacttggggtggcaagtaaggcttgagagaggagaactgagaccttcagtgaagggtcccagtgccccttccccatcaactgcccccattacccattctgctcatgctttttcattcattcctcaatctgttggtgcatgtctgatgagtgcagtctgtgcctcgctcaccttggtttccttcctgtgtggctcttctgccacaattctgtccctcttccttctatatgtgcttcctcaccccctcagaatgccatctcctgagtgtaatgcatcgctgcctctggacactgccatataacctatccatcccactatctacccattcatccctgcaaccatgcagccatccaactatctatccagccaaccagccaatcagccaactcttcaaccatccatccttccatccatccatccatccatccatccaatcagccaactcttcaaccatccatccttccatccatccatccatccatccatccacccatccacccattcttccatccattcttccatccatccatccatccatccactcttccatccatccaaccatccatccattcaacatccattcatccatctacctatccatccacccatccactcatacatccaattatctactcattcatccattcacctatccatccatctacctgtccaaccattcatccatccacctatccatccatctacctatccaaccattcacccatctgtctatccactcattcatccatccatccatccttctacacatccacccatccattcaaccatccactcacccatccatccatccatccatccaaccatctatccatttatctacccatttatccaaatatatgggcactgactctgtgcccaacccaacacagcagaggatagcctggtgattgggatctcttctttgaattcagaaacatctgaatttgactcccagctctacctcataccagattggtatggccttggtaaagtcagtgcacctctctaaacctcagtttccctttctataaaatgaggactcagagttgctgtgagtatagaagagtgaaaagtacatgatgggcttagcactaagccagacatatagaaagtgattgatacaagattttaccttttggagcttggggatgtaaaagtggatcagatatagtcactgccctcacagacctcatgctctagagcatggatcagcaaaccttttctataaagagctaggcagagcaatccaaagtcctatggctaaaattgtctgcagaggatctgagacagagccctcagttgccaggcaggaagagtggtaggaacagcacagagataccaggagaatggtgagttgggtgtgcatgtgtgtgacagggaggtaagaggacaggctgaggagggctctgaatgtcattctaaggggactggagtctataggggtggggatcagtagaaggggagtgaccatcagagggttatatcaaaaggacacaccaactccaggacagaagatggactacaggggagagactggtagctgaggatcagtgacaaatgtgattggcaatcgtttggggcaattgtggttggtaattgacagagctcagtctatgacactgggattagggcttagctcataatattggaatcaggacacagcctatgacatcaggattggagctcagtctatgatgccagatcaagattcagtctatgacaccaggattggggctcagtctatgataccaggataagagctaagactatgacaccaggattagggcttagcctatgacactaggatcagggatcaatatatgacaccaggataaaggcttagtctatgacactaggaggggggttcattctatgatacaagaatgaatgctcaaccaatgacagccagatgaagttcagtctgtgatatcaggatcaaggctcagtatatgacaccaggatcatggctcagtctgtgacacaaagattggagttcaatctgtaaaactaggatcagagttgagtcagtcattgggaactaggatcacagttgagttcatcatcaggtcaagctcaacctgttcctcggtcagaagcttccctataaaaacaaaactcagccaggcacagtggctcatgcctgtaatcccagcactttgggaggccgaggtgggaggatcatatgagaccaggagttcgagactagcctagccaacatggtgaaaccccatttcaactaaaaatgcaaaaattagctggacatggtggtacacatcggtggtcccagctactcagaagtctgagacaggagaatcgcttgtacccaggaggtggagactgcagtgagccaagatggaaccactccagcctgggtgacagagcaagactctcttgaaacaaaacaacaacaacaacaacaacaacaaaacatgcacaatcacacaaccctggcatttcttttcttttcttttttcattcttttcctttttttttttctttgagacagagtctcactctgtcacccaggctggagtgcaatggcacaatctcagttcactgcatcctgcccttccctggctgaagagattcccatgtgtcagcctccctagtagctggaattataagcacatgccaccatgcccagctaatgtttgtattttcagtagagactaggtttcgccatgttggtcaggctggtctcaaactcctcacctcaagtgatccgccttcctcggcctcccaaagtgctgggattacatgtgtgagccactgggcccggccaaccctggcctttcacctttgatctttggatcccagaccttcagggttcacagatacagggcatgaggtcctgcaggctacaggaggcctcaggcctccacaaggaccctgtccagtgaagcaagccaaccctgcaggctctcctccagccctaaggggacttggctgaggaatgggactgcctttcccctcccaagctcccaccaacctccaggaccctcccccacatctggctttcctcctccttcacagcctgcttgtttcgtttctgtgagtcatagatgctgcttcggcttctgggtggggaagagaacagatgcaaagcttaacaacagcagctgaacagagtccctccaaccagcccgggagggcaacctggaaagcagtgatggtggaaaccctggcattgctcgttactgtccagccactcatctgtgaatacaggtggcatcagggggcaaatttaccttgaagcaatggaaactgaagcttcaggccccatgtgtacctgccccatccaaagctctgcaagaggctccaacaaaaaactttttaggaacagctttattgagctaccatatacttcacccatttaaagcatacaattcagtggttttaggccaggtgcaatggctcatgcctgtaatcccagcactttgggaggccaaggcggggggattgcctgagctcaggagttccggaccagcctggccaacgtagcaagacccccgtctctactaaaaataaaaaaaattagccaggtgtggtggtgcatacgtgtaatcccagctactcaacaggctgaggcaggagaatcactcaaatcccggaggtggaggttgcagtgagccaagatggcgccactgcactccagcctgggcaacagagtgaggctctatctcaaaaaagagactgcataacagcggttcctcaaaaagctaagcatagattagcatgtactccagcaattcccttcctaggtaacgacccaagacaatggaaaacacacatccgtgcaattgcgtacatctgtatgcaattgttcatggcagcgtgatttgaaataaccaaatggtgaaaacgacccaaatgtccatcaacagatcaatggatacacgaaatgtggtatctccatgcaattgaatattattcagccctaaaacaaataaagcactggccgggcaccgtggctcacacctgtaatccctacactttgggaggctgaggcatgcagatcacctgaggtcaggagttctagactagcctggccaacatggtgaaaccccaactctattaatcacacaaaattagccaggtgcagtggtgtgcacctgtaatcccagctactcaggaggctgaggcaggagaatggcttgaactcgggaggcggaggttgtggtgagctgagatcacgccactgcactccagcttgggggcaacagagcaagactctgtggaagaagaagaagaagaagaagaaggagaaggagaaggagaaggagaaggagaaggagaaggagaaggagaaggagaaggagaaggagaaggagaaggagaaggagaaggagaaggagaaggagaaggagaaggagaaggagaaggagaaggagaaggagaaggaggagaagaaggagaagaaggagaagaaggagaagaaggagaagaagaaggagaaaagaagaggaagaagaggaagaagaagacaagaagaggaagaggaagaagaaaggaagaaggaaggagaagaagaggaggaggaagaaggagaaggaggaagaagaaggaagaaggtggaggaggaggaggaagaggaggaggaggaaaaacaatgtgggcattgggtacttgcatttggtctacgggaccattagcatcattgatcaactgagggctttttcctagagcaggcataacaaattgatttcatacataagccaacttggatcacctggtgatggctgttggaactggtgtgttgggaagaatcctgagggggcaaatggctaagcaggaaattgactcatgattgactagcaatgtctgccataggcttgggatggggaagaggtgacacgtatgttggcttcaagatcattgagaccatcttccccctcccctcaccaactcattttatagttgagaaaactgaggtccagggtgaccagcaacagatgcagaatccaggtcctggcttcctcagcactcccagcttatccctgacaccttgtccctcctttctccacaggctctgagcccaagtcatgtgtccagccttttgactctggagctgtggcttcagccaccaagagcagcagtggatcctggaaacctgagaacccagacttcttctctgccatgggggatgatcaggcaggtgtctgactgctgaaacgggcaggagctgatgacgacagtggcagcaagtacactttgtttagcacctgcattttaccaggcactttgtgtacattatctcagggaatcctcatcgaaacttgcaaagtcatttattatcctgttttacctatgaggaaaccagaatctgttctgaaataagaagagggaggaaaggagcaatggagggatgaatggatggatggatagatggatgggtgggtgggtgtctggatagatggatggatagatggaaggaaagaggaaatcaaggaaagatgagtagaaggatggatggatggatggatacgtggatgaatagaagggtggctgggtggatgaatggatgacggatgactagaaggaagggaggaaagatgggtagaagtgtgggtgaatggataaatggatgatgggtgaataaaaagaagaaagctagatggatagatggatggactgatggaaggaaggaggatggatgaaggaaggaaggaaagaaggaagtatggatggataggtagaaggatgggtggattaaaggaaggaaggagagatggttgatgaatgaaagagtagaaaggtgggtgaatggaaggaaggaagaaagatgagaaatgtgggtggatggatacatgaatgattgatgaataaaatgaaagatggaaggaaggaagatggatggatgaaaggaaagaggatggataaatgaaagaatgaaggaaggatggatggataatggatgggtgagtggatggatgagaagaaatgtgagtggaaggaaggaaggaagaaagatggatgggtgaaaggaaggaagatggctagattgatgaaaggaaggaggatggataaatgaaagaatgaaggaaggatggatggataatgggtgggtgaatggatggatgagaagaagggtgagtgaaaaggaaggaaaaaaggaagaaaggaaggaagggggatggatggatgggttgatggaaggaaggaggatggataaataaaagaatgaaggaaggatagataaataatgggtgggtgaatggatggatgagtagaagggtgagaggaaggaaggaaggaagatgggtggatgaaaggaaggaggatggataaatgaatgaatgaaggaaagatggatgggtaatggatggatgaatggatggatgagaagaagagtgagtggaaggaaggaagatggataaataaaagaataaaggaaggatggatggataacggatgggtgaatggatagatgagaagacgggtgagtggaaggaaggaaagaaggaaggaagtaaggaagatggatggatgggttgatggaaggaaggaggatggataaatgaaaggatgaaggaaggatggacggataatggaggggtaatggatagatgagaagaaggatgagaggaagaaaggaaggaaggagggaaggaaaggaaggaaggaaggaaggaaggaaggaaggaaggaaggcaggctgactaaaaccaaatacagcctagaaaggtagactgacttgcctaagttcccgtcatggcagagttgggattcaagcccattctgactctgcagcctgcgtccataccctctgctctcatcacactttctctaagcgcttatgtcaggggcctgtggggtaggccagcccccaggctccagtctcaaaagaaagaccctgaaagcttgtggtccctgggtggagttggggcacagttaacatcaagtcctgatggtgtgtggctgggactgaggtcgtggcaaaggtcctggtgacagcctccaggctgcttcagggaaggtctcctggggtggaagatgtggcatctaggaggtgcatccttaagagggtaggggccagggagaggtctcgtaaacatagttcagctccagctccaccagggaccaagacagtcaggtggtgtgtgttgggtctccaggaagcagactcagacggagttgggctgaaatgggcaagcttttatatccccttgtcaatcacccattgctgatgggctgcccaggaagggggctgagaactgacagttccttctcccacagcctcggaggatctgagtggttttccacaacatccgctacactaaggaaggaggatctgttacggttaagccataaagggcatcccatgtacccaggcttgtcattttatggaagaggacactgaggggctgggcatggtggctcgtgcctgtaatcacagcactttgggaggccgaggcgggcagatcacttgaggtcaggagtttgagaccagtctgggcaacatgcccagcacaggccagcctgagcaacggggtgaaaccctgtctctactaaaaatacaaaaattagctgcgcatggaggtgtgcacctgtagtcccaactactcgggagactggggcaagagaatcgcttgaacccaggaggtggggattgcagtgagccaagatcacaccattgcactccagcctgggtgacagaatgaggaaaaaagacactgagatgcaagcagtgaaggaattagtccagatgtcatggaaggtcccgggtaaaggatcacagaaccaggactggagtttagccctgcgccctccctgggatctggacctctttgaaagagaaccatgggatgcaggcagttggacaggtaacacggcaatgggggaacggtgggctctggggaagcaggcaggcctgtgagtaggcagcaaggctgtgcccccacccgctggcaaatctgccccctcttcctgagtctcgattctcatcatccactttgtcttcagagctggagaccagggcattttccttgtcccttcctctcccatcaggcaccaagtcctgtgaattttgaaccccaaggaccctccatttctgtgcattgcaccctccttctccttccctggtggtggtccccgtcatggctcccccaggtaatctgcacgggtgtcctggctgggccacctgcctgcatcttggccccatccaagcccatctctgctctgcaagctgaacacatatgtatttttttttgagacagggtctcactccatcacccaggctggagtgcagtggcacaatctcggctcactgcaacctccacctcccaggttcaagagattcttgtgcctcagcctcctgagtagctgagattacaggcacccaccaccacatccagctaatttttgtatttttagaagagatggggttttgccatgttggccaggctgttctcaaactcctggactcatgtgatccacccgcctcaggcctcctgaagtgctgggattacaggcgtgagccacggcgcccagccagcaagctgaataatctttctgaaggccaatcactgccctccctaccaccactattggaaacttccagattaaatccatgctttggccaaccagactcgtgttccccaacggtccacacctcagccataggaacatttgccatttgcttaaaggcgccatgagctctccagcctgcagacttctggatgtcctgttctttcactgcctgtaatgtgcttacctgcagtatctgcctagccagctcctactcagtcctcagaccttcacttgctgccatttcctccaggaagccctccctgatactttttggagagcgtaatctgttccccctcagatcttccccagcctgctggctggaaccttctatcattcttgactataacggtttggcttaatcatctatcttctccaattagctccatgaggacaggggagactgtgtgattccatttggggttgtcagaggcttgctcagaggaagggtcctgactcctgaaatttatttattttatgtaatttaattatttatttgtagagacggggtcttctctgtcacccaggttggagtgcagtggtgtgatcatagctcactgcaacctctgcctcctgaactcaagcaaccctcccacctcagtttccagagtagctgggactacaggtgcacgccaccacatccggctagttgttttttttttttaaagatgggatttcgctatgctgcccgggctggtctcaaacccctagtctcaactgatcctcctactttaacctcccaaagcactgggattacaggtgtgagccacggccctggccccctgactcctgaaatttaaaaacagcaatatattattctatccgccaaggtttgcattgcccaagcatctcatttcacctgcacaacacaatcctacaagtaggtggcagtatgcccattttagagatggaaaaaactgaggctcagagagctttaggtacttgatcgaggtcatgctaagctaacaacagttaccatagcaggatgcaaaccttgactgaggtctttttacccaatgaccatttgaaaaccatctgccctgtgaggcacggtggctcatgtctgtaattccagcactttgggaggccgaggtgggatggtcactttagcccaggatttcaagaccagcctgggcaacataacaagactctgtctctacaaaaaataaaaaaatactagctggggccgggcgtggtgactcacgcctgtaatcccagcactttgggaggctgaggcaggcagatcacctgaggtcaggagttcgagaccagtctggccaacatggtaaaacccgtctctactaaaaataaaaaaattagccaggtgtggtggtggacacctgtaatcccagctactcgggagactgaggcaggagactcacttgaacccaggaggtggaggttgcagtgagccaagatcgcaccattgcactccagcctaggcaacaagagtgaaactccatctcaaaaaaaaaaaaatatatatatatatacacatatatatattttatatatatatacacatatatatattttatatatatatacacatatatatattttatatatatatatacacatatatatttttatatatatatattttatatatattttttatatatatatattttatatatatatataaaagctgggcatggtagtgcagacctggaaagaaggaagaaaggaaagaaagagagagagagagagagagagagggagggagggagggagggcggaaggaaggaaggaaggaaggaaggagaagactatctgctctatgatttacttgccattttgtttgaaattaagccacttttttacatgacaaaatgggaccagggacacattatgctttggtgtgttatctttttccaacagacaacaagatcaataactatttacatttttaaaataagcatgtattcatgtactatgcaaaactgtgcgtggtgagcctttctgaagagtggggaaccctgggctgtttcacctctggatttgatgggggatcccatcccccaaggctcccccaggtctagggaacaggagcctggatttatagcatcctctttggggtgtcagggccagcagggcagcgtacgatgcttactcagatacctggaaagacccccactgggctggctctcatcttttcttgcccaagatatgtcagaacaaaggtgcaagctccaaaataaaagatgagacaccccctctctccctccctcaatgtacctaccagtgggagctggaacagcctgtactgcctggctccccactccccagctccacccccatctctggcctggctcccacctctgcctcctctgagggaggccagatgcaggagaaagagggaggctcagccaggccaagaggctgtcctgacgtgtttatatttacaggaggatgaaaaccagagacacaaaaaaaccttcgggggctgcgacagaaaagacagtaggaggttttccaggcactgggggtaggaatggagccatttggggggtaagtgggaatttgaaaggaggctgccgcccaagtcacatgagggccagccagagctagagctgtggctctttagaaagagactgaaaaagagggaccctggtgatcaaaaggcagagggaggaagaggacgcagaggaggagtcagcagggagaagggagggaaatgaggacggtggccacaaaggagagattcaagaaggcaggctgtggaaacagcagagtgagtccttaggaagttaaacctaaaattgaccaggcgcggcggctcatgcccgtaatcccagcactttgggaggccgaggcgggtgaatcatgaggtcaggagttcaagagcagcctggccaagatggtgaaaccgtgtctctactaaaaatacaaaattaggcgggtgcagtgactcacgcctgtaatcccagcagtttgggaggctgaggcggatggatcatctgaggtcgggggtttgagaccagcctgggcaacatggagaaaccctatctctactaaaaatacgaaattagctgggcgtggtggcacatgcctgtaatcccagctactcgggaggctgaggcaggagaatcgcttgaacccaggaggcagaggttgcagtgagctgagatcgggccattgcactccagcctaggcaacaagagtgaaactccgtctcaggaaaaaaaagaaaaaaaaaaggaaagaaagaaaggaaagttaaacctaaaattggctgggcacggtggctcatgcccgtaatcccagccctttgggaggctgaggcaggtgaatcatgaggtcaggagttcaagagcagcctggccaagatggtgaaactctgtctctactaaaaatacaaaaattagccgggcattgtggcaggcgcctgtaattccagctacttgggaggctgaggcaggagaattgtttgaacccgggaggcagatgtttcagtgagctgatactatgccattgcattccagcctgggcgacagagtgagactccatctcaaaaaaattaaaagaaagaaagaaagaaagttaaacctaaaattgccatgcaattgtgccactgcactccagcccaggagacagagcgagatgccgtctcaaaaaataaaataaattagtttgggcgcagcggctcacgcttgtaaccccagcactttcggaggctgagcggggaggatcatctgaaatcaggaatttcagaccagcctcggcaacatgatgaaaccgtgtctctactgaaaatagaaaaatcagccgggcatggtggtgcacacctgtaatcccaactactcaggagggtgaggcacgagaatcacttgaacccaggaggcagaggttgcagtgagccgagatggtgccactccactccagcctgggtgacagagcaagactctgtctcaaaaagtaaaaaataggggctgggcgcggtggctcacgcctgtaatcccagcactttgggaggccaaagcgggtggatcacgaggtcaggagatcgagaccatcctggctaacacagggaaactccatctctactaaaaatacaaaaaaattagccgggcgtggtggcgggggcctgtagtcccagctactcgggaggctgaggcaggagaatggcgtgaacccgggaggtggagcttgcagtgagctgagattgcaccactgcactccagcctgggcaacagagtgagactccatctcaaaaaataataaataaataaaataaataaataaatgtaaaaataaaattaccatatgatcccgcaattccacttctgggtatcttcccagaagaactgagagcaaggacccacagatatctgcacactgatgttgatagcagcgttattcacaagagccaacagatggaaagagcccaggtgtctgctgatggatggatgaataaatgcgatgtgatccatccacacaatggaatacaattcaaccttaaaaaggaaggaaattctgacacatgctgcaacgtggaggaatcttgaggacgttatgctcggtgaaataaaccagacacaaaaggataaatactgtctgattccactcgtaggaggtctctggactcgtcgggttcatagatttaccacaccccgctttttttttttctttctttctttctttggagacagggtcttgctttgtcacccaggctggagtgcgatagcatgatcacagctcacttcagctttgacctcccaggttcaagtgatcctcccacctcagcctcccatgtagctgggactacaggagcctcccaccatgcccagctcacttttaaatttttttgtagagatagggtcttgttatgttgtccaggcgggtctcaaactcctgggctcaagcgatcctcccagattgctgggattccaaggcatgagccaccacgccaggcctggtcagattcatggagacagaaagtagaaaggtgggtgccaggggctgggaggggaatgaggaggctgtgtttcatgggaacagaattttaatttgggaagatgagaaagttctggagatagatggaggtgatggttgcacagcaatgggaatgtgcttaatgatactgaactggacactgaaaaatggttaagatgtgggcccgggtacagtggctcacgcctgtaatcccaacactttgggaggctgaggcaggaggatcacttgaagctaggagtttaagaccatcctggccaacattgtgaaaccccgtctctaataaaaaatatataaaaattcaccaggagtggtggcacatgtctgtagccccagcatcttgggaggccgaggcagttgaattgcctgtggtcaggagttcgagaccaacccggccaacattgtgaaacaccatctccactaaaaatacaaaaattagccggacataatggtgggtgcctgtaatcccagctactcaggaggctgaggcagaagaatcacttgaacccgggaggtgaaggttgcagtgagctgagattgtaccactgcactccagcctgggcgacagagcaagactccatctcaaaaaaaaaaaaggttacgatgataaatgttatgtgatgtgtatttcactggaataaaaagaagggaggggccaaatctataaagacatcaacatgggtgagttctgggtaaagggcaaaccctgcgtagctcctccttcctcatcccaagacaagtgtggacactggccccttgcctcctgccggcaaagatccccagctgacaaattgagagcatccaccaagggctgcctgagatcacatggatgcctggagccacatctcagcactggcctcgcatggagccatgggggaagcccactcgcccacctacccaccaaaccctgtgtgcagacagtcctaacaaatgcctggaaaaggacaattcctgtcctgcagatcctgacagcccagaggaagggcaccttaccaaccttgaggagtcaggaaggcaacctggagggcatgcccaagctgggttttgacggttgcataggagttcaccagacagactcaggatgggccgggtgggagaggaggttttgcaagaagaaaaggcaggtgccctggctggacagaatgacaaatacaatgactgggaggagaagagggaagtgaaggacaaaagaagggaaggacaaagaaataggaacaggagcagaaactgtaccaaaaagaaaaaaaaaaagagagagagataatcagatggaaactcagtgacgagaagtgctttgccaaggctagaagtaggggaatctggcatggaagaccagacttctggtccttttgtgggggtgagctcttgaaggtccaggttagacaggggactgggggactactccctcccattccatcccacccgctgtgaggagggcgctgagcccaggagggacaggtaggggacaggcagggtctggatgttgggagcagggaccttgtggtcaagagaccccaggttctgctgccccttggtcaatgtcttcttctccctcctcaccttcccaacctacaggaggatgattttcccaggcggctcagcgagagtatggaggacctcagcctggatttgggggcccttcagggcagcgagtatctgcaggacctgggccttggggccccttcccacagccagcctggggagaccccagacagccgccccaccggtgaagaaccaggaagagattctcttttctccagcttggcagggtcccaagacctgtcaaggcggcgcagctgggaaaggtcgcggagctgctcagagagctggcggaggtcagttccccactgctgcctgcttcccacaatgcacccctgggacagggaagaggtccagaaggccagagccaggtcctaagacaagccaccccttgcacctgccgtggtccccaacctttttggtaccagggaccagtttcatggaagacaatttttccatggacccagggggacaggggatactttctggacaattcaagcacattccatttatcgtgcactttatttatattacgttgtaatacataatgaaataattatacaattcatcatcatgtagaatcagtgggagccccgagcttgttttcctgcactagacagtccattctgggggtgatgggagacagtgacagatcatcaggcactagattctcttgtttttgtgtttgtttttttttttttgtttttgttttttttttgagatggagtctcactccattgcccaggctggagtgcagtggcgtgatctcggctcactgcaatctccgcctcctgggttcaagcgattctcctgcctcagcctcccgagtagctgggattacaggcacgcaccaccacacccggctaatgtttgtatttttagtagagacggggtttcaccatgttggtcaggctggtctcgaactcctgacttcatgatctgcctgcctcagcctcccaaagtgctgggattacaggtgtgagccaccgcacccagcctagattctcataaggagtgtgcaacctagatccctcgcatgtgccgttcacaatacagttcccgctcctatgagaatttttttttttttttttttgagacagaatctcactctgttgcccaggctacaggctcacaccaccacacccggctaattttttgtatttttagtagagatggagttttaccatgttggccagactagtctcaaactcctgacctcaggagatcctcccgccttggcctcccaagtgctgacatgacaggcatgagtcaccatgccgggcccctgctcctttgataatctaatgctgccactcatatgacaggaggtggagctcaggcagtcatgtgagcaatggggagtggctgtaaatacagatgaagcttcgctcacatgcctgcgctcaccttctgctttgcagcccggattctaaaaggtcacagactagtaccagtctgtggcccaggagttggggatccctgctctagggccatgaggggcgtctgcaccatcagaggcagcccaaaaaaccctcttctaacttgcacatgcatgaacatagagcctgtgcaagtgaccgagcatgcatgcacaagcccaaactgaaaactgcatgtgaggccgggcgcggtggctcacacctataatcccagcactttgggaggccaaggcgggtggatcacctgaggtcaggagtttaagaccagccatggtcaacatggcaaaaccccctgtctactaaaaatacaaaaattagccaggtgtggtagtgcacacctgtagtcccagctactcggtaggctgaggcccgagaatcgcttgaacccaggagacagaggttgcagtgagccaagtttatgccactgcactccagcctgggcgacagagcgagactctgtctcaaaaaaaaaggaagaaaaaaaaatcgactgcatgcacacactgcaagcacacaaaaacctaaatttacacacctgctgagagtacggccacgatcagcacccatcagacccacgcatataagcttaaacgtgatctgcatactgcttgcatgcatacgcatgaagccaccatgcagttatgatcagaacggaaatgtgtgagacaccatgcaccccacagtggcagcaccaaatagtagaggcagggggtgctctagccacccctaacccgtgtccctcaaccccttccaagtcatcccacatagaaattcaggccgggtgcagtggctcacgcctgtaatcccagcactttgggaggcagagtcgggcggatcacttgaggtgaggagttcgagatcagcctggctaatgtggtgaaaccctgtctgtactaaaaatacaaaaattagctgggcatggtggcacgtgcctgtaatcccagctatttgggaggctgagggaggagaatcgtttgaacctgggaggcggaggttgcagtgagctgcgatcgtgccactgcactccagcctgggtgacagagtgagactctgtctcaaaaaaaaaaaaagaaagaaaagaaagaaagaaaagaaagaaaaagaaagaaagaaagaaaaggaagaaagaaaaagaaagaaaaggaaggaaggaaggaaggaagaaagaaaaggaaggaaggaagaaaggaaggaagaaaaggaaggaagaaaggaaggaagaaaagaaaagaaagaaaagaaagagaaaaccagtctgtgcaaaaacgatctgagatgcaaatgtagctccaacaaatctaaccaggctggctttctttgtcctctcccccttgccacccactcctctcatattgggaggtctggacccctttctgtggcttgcgcacccttccttgtcctggaagggcccccttgcatgttctttcaagcccccctggatgcctggggcagcagccaggtgggcaagacctgctgaagccccagtaccctgtcttctccactaggctcagcctcgatgcctcagctgtggatgaggaaccctgtctcccccgaacactggccagccttgctttgaacctgccaggaggagggctgaagacctggactcaagggtgtctctctgggggcgggacccccgcagagagcccaggcaaggtgggtataacctgcagccacccctgacaatagcacacttttgggtttagaaagcagtgctataggtaggaaggagagacttgccagggctggtggcgcttacccaccatggcagggtggaggctgcttatctgtggtgtggcccgtgcctcagttgtctctgggtcctaggattccagcctaggcctgaagggatttccctgggtaagcatctggggcaggccatgcatggccatgactccaacccaagggctggagacaaggggatgggggatgtcttatcttgcagtttcagccaggcttggaggatctttgcctggagtgtagccctgcagccggaaggcagctgtgtctgtggttggggtatgcagctacagctaaggagaatttgtgtctgacctgagatcccagctcacacctgaggaatgcatgcttggagctgtggctggtggctgagacatctttggctgtgatcacaaaggaccctgggggaaattcctggccattgttggaagctgtggctctgatacctggggctccagctcagagctggaggctcctccgccaggactacagccctgtggctggggagggggtggctgaacccatgtcttatggctggggggagtggctggaggctgaggcttggatgagtgtgtcaccccatttctgtggaggtggccctggctgtgggttgggcccctcaatccagggaacctgcctgcagtccaggctgccttcccagcttagtgagatgtttaatcccctgcaggaatgtgacagccccaagaaaagagggaggtcaaggtccgttcctgtgtccttctatgagatccgctctccggaaatctctccgggtttggaagtgcccactccacctgttcaaggtagccagcctgggagtttccttcattcaaaccaagtcagggaaagaggagcctggccaacatggtgaaaccctgttggggtttcatccttcatcctggagggtccccttggtggggctccagatgggccccagggaagggaagggagctggcttagggtcccctgggcagggactgagcagaacgctgggggaagccagagaggggaagggacctccagcatctgtccctcctcctctccctgcagctcttgagccagtgtgagattgccccattgcaatgagcttgtccccaagattctctcttctctctatgactcttttttttttttgagatagagtcttgctctgtcgcccaggctgcagtgcagtggtgcaatctcagttcactgcaacctccgcctcccgggttcatgcccttctccggcctcagcctcccaagtagctgggactacaagcacccgctaccatgcccggctaatttttgtatttttagtagacacagggtttcgccatgttggccaggctggtctcaaagtcctggcctctagtgatcggcccgcctcaacctcccaaagttctgagattacaggcatgaaccaccgcgcccagcattctgactatttctttatctctttctttatctctgaatttttatcctgagatcttgcacctctctggcatcagacaaacctggagtctaaacacataacaagtctctgagcctctgtggcttcctctattagaacaggtgcagcagctcacacctggaatcccagcaccttgggaggctgaggcaggtgaataacttgagcccaggagtttgaggccagcctgggcaacatggcgaaaccttgtctctactaaaaatacaaaaaacaattagccaggcatgacggtgtgcacctgtagtcccagctactttggaggctgagatgggaggatcacttaaacccaggaggtcaaggctgcagtgagttctgatggcaggactgcgctccgctctgggtgacagagtgaaaccgtctcaaaaaaaaaaaaaaaaaggcctggtgcggtggctcacgcctgtaatcctagcactttgggaggccgaggcaggtggatcacctgaggtccagagttcgagaccaccctggccaacatggtgaaaccccgtctctactaaaaatataaaaacgcaagaattagtcgggcatggtggtgtgcgcctgtaatcccagctactcgggaggctgagacaggagacttgcttgaacccaggaggcggaggttgcagtgagctgagattgagccattgcactccagccagggtgacagagcgagactgtgtctaaggaaaaaaaggggaggggggacaataagcgtatctccttcaggccacttggagagtctgctgatctcacacacgtaaagcacttagtaggttgtaagcactcacgagacactggggacacctgcgtttgtccctggctctctgtcctcttctcgtctctgttgcctgagagtacaggccctgtctgcatggcctccagttctgcaggggcccagggtggcatccgggagggctctgctgggctggtcctgtcccagagctcctgacaactgtgcttcctgggatggggggcttcttccaggcctggaacctccagtgctggagtgcatggaaaaagaccatgtggaaccagatcacgtgtgagtttctgcctcgtggtgggggagggacccccagggaacaggccacaaagtcagggctgcgggaggagggctgccagggtgcagtgttgctggccataagtgaccagggccagacaccatcccactagtccccccataacctcatctttctgccaccatccttctcccggtgggagggacccaggcccctcagaaaggttctcaatgtagccttgggagacaattgtggcttttttttttttttttttttttttttgagatagggtctcactctgtcacccaggctggagtacagtggcgtgatctcagctcactgcagcctctgccccctgggttcaagtgattctcctgcctcagcctccagagtaactgggactacaggcgcccgccaccacgcccggctaatttttgtatttctagtacagacggggtttcaccatgttggccaggctggtctcgaacccctgacctcaggtgatccgcccaccttggcctcccaaagtactgggattacaggcgtgagccactgtgcccggctgactgtggctttgagtagggtctgcatcaggacctgaggcctgcttgggcaaccccagcttatctaggggagagtgtctgtaacctggagctaccatgggctgttctaatcccacctccacccccacaggctgattgtccagcaggtgcttcaagaacttcgacagtaccatgggtaagtgggaatcgggacaggcttgaggggagcaaagtgggagacaaaagcaggaagcatgcaggggtgtgcacaggtgtaggagacaggggtagagaagactgggtgagggctgggtacagtggctcacgcctgtaatcccagcactttgggaggctgaggcaggcagatcacctgaggtcaggagttcgagaccagcctggccaacatggcgaaacctcgtctctactcaaaatacaaaaattagccaggcgtggtggcacgcacctgtaatcccagctactcaggaggctgaggcaggagaattgattgaacccaggagttggaggttgcagtgagctgagactgcaccattgtactccagcctgggcaacacagtgaaactctgtctcaaaaaaatagaaaaaagacaaggctgggttcaagggaagaaaaatggggcagaagaggagggaggaggatagaagacaagagttggagaggagcaggctgccactggcataggggttccttggagcaaacaggtgaaggtgcctcctgcctaagacactgccatctgttacaaaatcttcctgtagctggatgtggtggctcataccactgtaatcccaacactttgggaggccaaggtgagaggatcatttggaggccacgagtttgagaccagcttgggaaagatagtgagaccctgtctctacaaaaaacatttaaaaatttgctgggcgaggtggctcatgcctatgatcccagcaatttgggaggctgaggtgggaggattgtttgagcccaggagtttgagaccagcctgggcaacagagtgagactctgtctgtataattttttttttttgattagctgggcgtggtggcacatacctgtagtccccagctactctggggggtgtgggggtgttgacgcaggaggatggctgagtccaggcagtgaaggctgccatgagccatgattatgccactgcacaccagcctgagcaacagagcaaaaccctgtttaaaaaaaaaaaaaaattgtgggctgggcgcagtggctcacacctgtaatcccagcactttgggaggccaaggcgggcggatcacgaggtcaggagatcgagaccatcctgactaacatggtgaaaccccgtctctactaaaaaatacaaaaaattagctgggcatggtggcaggcgcctgtagtcccagctactcaggaggctgaggcaggagaatggcgtgaacccaggaggcggagcttgcagtgagccgagatcgcaccaccacactccagcctgggtgacagagcgagactccatctcaaaaaaaaaaaaaactgtgtaagatttaagtacttggttaaaaaaaaaattaaaaattagccaggcatggtggcacatgcctatagtcccagctactcaggagactgaggcgggaggattgctcaagccccggaggtcgaggctgcagtgagctgtgattgtaccactgcactccagcctgggcaacagagggagacgccatctctattaaaaaagaaaaaaaacatcttcctgctacactgattttgtttagccaagacacattactgccctctgctggaaaacctgtcataatgtctcatatacaagcccagagtgtcaaggacaggtgggctcttagacggggtacctggtgtatgcctgtactcggtagcactggggtaggtgagtgggagaagaggctgccgacccaggtatctgtcccctctgatcctgcagggcccggcagagggcttgcatgtcagccagccccggaggagcccactcgaacctgacctggtttgaattcctgtcggagtaagtacacagatctgcttctggggagggcagccttggattcgaacaagtgtttacagatggtcctttgggccagaccccccatgctgggggcaggagctggagcccccatcagggcaatggtgggagctggcaggaaagggagggatgaggctcccgtataccctgagaggacagaggaagacttcctggaggaggtgacgatgtaagcagggttctgacggaagagtaggagtttgccaatacgtgcagataaggatgaaggaaaaaaaaagaaactagaaggcttagggaatgacatcggagtggggctgggaggagggaaggtgggagaaatcagcagagaccagaccacctcagctacacaaaggcgctcacactttatccgaaacagcagtggggcttgggtgcggtggctcacgcctataatcccagcactttgggaggccgaggagggtggatcatctgaggtcaggagttcaagaccagcctggccaacatggtgaaacccaatctctactaaaaatacaaaaattagccggatgtggtggcgggtgcctgtaatcccagctactcacgaggctgaggcaggacaatcacttgaacccaggaggcggaggttgcagtgagccaagatcacgcccttgcactccagcctgggcaacagagtgaaactccgtctcaaaaataaataaataataaataaataaataaataaataaataaataaaaataaaaagagcagtggggcctttgagcattatcagttctggtgataggatggggacagtatgaggaccacagacagggctggaggtccctgaatccctctctctccctcctttcctccctccctctctcactcactcattcattcaagaaacatttatggatatttacaaagttccagaagccactcggactgggatctgggggcacagactggaggaatggcgtctccgcccaggaaatagaccctaccagagcaggaatcatgtctgccttatatgtcactgacctaatatttattaaatgaaggtgtgcctgaaatccaggaaaccatgccagtgacctggggatggagtttggggtgggggaggagatagaagaatgagcaggatttaaagaccaattagggccgggcgtggtggctcatgcctgtaatcccagcattttgggaagctgaggcagatggatcacctaagcctggccaacacggtgaaaccccacctctactaaaaatacaaaacaattagctgggcacagtggcacacacctgtggtcccagctactcgggaggctgaggcatgagaatcgcttgaacctggaggcagaggctgcagtgagccgagattgcaccactgcactccagcctgggtgacagagtgagactctgtctcaaaataaataacaaaataactaaataaataaataaataaaggccaattagataccgggtgggggtggggggcgtgaattagagggagaaatcataagtgaacagagctgaaattcccagcccaggcattgagggacctcaaacctgagatcacgttgcatttccctctgtaaacccagtccccaaagctcttgcaaacattcattcatgtctgctgagtgaataagtaagacagggaaggagggagggaaggaggaagtcaagggccagggaaggggtaaggcaggaccaggaggccacagggagacaggttgcaggtggattcctgaagcaacccacagggctgcctcagaatggcccctggccccctctagtggaccttccctctcgtccctcaggagcgaggacggtgctggcaagaacgagaagagtgacaagagtaccagtgtgaagcgcaggctgagctgcctccgcagtcgagtgaccaggcagaaggagaaggtaaggggagctaagccacgggggccctcctctgccttccccagcttggcttgctgcccttagcccgggagccctgtgactggggctggtggtgggctgggtacacagtatataagagggccagtgcctgcagagggcatcctgagacccacctctgtcccatccaggggaagagcccagcacatctgaaggacaagggccaggatgcacgagagaggcgggagtgtgtcaatgggcaccagctgttgcaagggaccttctccggcccctccagctgccccctgtgtggcaaacctttcttgagctcaggtaagtctggtggcccaatccatcctcctggagggcagccactttctcttcttcacgtcctttcaatcatactcctggggtctcttttgatgtgtgcatcctcgttctgttttgccctctcctcggcggctccctggagagaaccagggatcagtccctgggcacagggacccttgggctaactcgggactggcaacagtccctttaagtctcagcttttgcgattgtgggaatcctcctgcagcatctggacttgagccgtgtatgagtttgctagggctgtcatgacaaagtaccatgcaccaggtggcttaaccatcagagatatattcccttgcacttctgggggcttaaagtctgagatcaagggctaagcttcatatgaaggtgccaggaaatgatccattccaggcgtctctcctggcttcatcccttagcctcacatggccctgtctgtgtcccagtttcccctttctataaggataccagccatattggattaggggcccaccacactccagtgtggcctcagcttagcttatttacatccatgaagactctattttcaaataaggtcgcatcctaaaggacagaagtgggggagtaggattgcaacacatgaatttgatgggtggggggaggggcatacaattttatccatagcaggtcgttttctgcttcctggggcacttggtggttgtggggtggtgagggaaagagtctctactcgagaaaaagtaccagattcaagagactcccagaaagagatggctctggtcattgccgggatttagaactttgtctttttgcaaataagctccacgttggagggaatgaagaggaggaggtggtggcaactgcgtgttagaaaagatgcgtgcgccgtttgtaaccgaatccaaactgcagtctgtggctggcagaactcaggctagttcacagtttctgggccttagcactgtcaacatttggggccaggtgattctttgttctaaggggctatcctgtgcattgtaggatatttagtagcatccctggccttcaccctctaaatgctggtagtaaccacctcctgcctccagttgcaacaatcaaaaatgtctccagacatggccaaaagtctcctggggggcagaatttcctccagacaggaatcaatgggtgaatgagatgggcaaacagatcctagatgggcttagaccctgcagtgagagaacatctccacccccggggcaagtgcctctgagcaacgtgccttgcaggttttgcatttgttggctttacctgcttcaggcgtgggaattttccttctttctcattttcctctctttctgcagtgccattgctggccatggggctgggggtggctgttggtggctagtggtgtcaacgatgttcctctttgagctccctctgttaggcaatccccatccagctctgtgacccatgagctgtcctcagcagaggctggcatgagctttttgcaaaatttttttttttttttttgcgacagggtctcactctgttgcccaggctggagtgcaatggtgtgatctcagcatactgtagcctctttctcctgggctcaagcaatcctcccacctcctcctcccgagtagctgggtctacaggtgtgcaccaccatgcttggctaagttattaacttatttttgtagagacaaggtctcactatattgcccaggctgctttcaaactcctggactcaagcgatcctcccgcctcagcctcccaaagtgctggaattataggtgtgagccacctcacccagcctttgccaaatcttcagtgcaccaacaaagtcagtgtgttgaagtccttaatttgggacagcaggtgactccctcttttccctggcaccttgttctcttctgcaggggatgagctgtgctcagtctatcttaggcatcagatgcaaggggcagatagaaggttggaagttggaagagtaaagccagaggtctagaaccaagactgcacagagcaggcgctgggagcctgccctcggatacccttccttgaacagctccaggctgagctgaaccatgcacttccttctgtgattgctggttccttatcattctccatttgtttctgttcctgcttttgctttgcttctcagaaaaatcctgaggtctttaaactctgatttggggtcacccaaggtcttgtatgtccatgtggcccactgacttagagcgtcgccgtcatctgggaacttcattattattattattattattattattattattattattattattattttgagacggagtcccactctgtcacccaggctggagtgcagtggcacgatcatagctcactgcaactctcacctcccaggttcaagcgattctcctgccccagcctcccgagtagcggggattacaggtgcccaccaccacgcccagctaatttttgtatttttagtagaaacagggtttcaccatgttggccaggctggtcttaaactcctgacctcaagtgatttgcctgccttggcctcccaaagtgctgggattacaggcgtgagccaccgcgcctggcctgtcacctgggaactttttcaaaatttctattttagagataggatctatctctctctatctctctctctctctctctctctctctctctctctctcccccctccctctctccctccctccctctctctctccctctctccctctctctctctctctctctccccctctccctctctctctctccctccccctctctccctctctccctctctctctctctccctctctctttctctctctctccctctccctctctccctctctctctctcctccccgccacccccggggctggagtgcagtggtgtgatcataactcactgcagccttgaaatcctcggcttaaggaatcctcccacctcagcctcacaaatacctgggaccacatgcatatataaccacaccctgctcatttttaacattttcgtttgtttgtagagacgggctcttgctatgttgcaaaaaaaaaaaaaaaaagacaaaggaaaaacatgaagttagaaaaggagacagagtgattacagagtttgtcaacctcagcactactgacatttggggctgtggtgtggggccgccctgtgcctgggaggaggttgaaaagcatccatcgtcttcacccacttggtggcaggagcgcctctagctatgatgaccaagttgccacgtgtcctctagtggcagggtaggaatgcagtcacccccaggtgaggaccacggctctccctcaagtgtccagggatagcctctccgaattggtgacattggaatccagatgtggaggaggtgggaaaagggccctgtggataggtagggaagagtattccaggtcgtaggtggaaaggtcccagggcaggaatgtgccccgggcagcagaaaggccagtgtgcttgaagtggaggtagaagaggtctgtcggaacctgttgcaggtcacacaaatgtgcatgcctgcccccatctgagccattgctcagaggaccctgtcacttgtcactcgatagctgagcttgctgtctgcaaatcccacctccacctagactcctatcagggcagacaggcttcagtggcccctgtgtgagcctggaagttcccattgctgcttcggatcccttctccactctgggcgctgcaaagacagttcctgccttccagctggggatttgggcgggacagcgtccagcacctccttatgagctttcagtccccctgaagttgtatgccacatctgctgtgtccctgcgtttttctggaggagcagagcagctagggttttcatcagatctccaaccagaacatgcgaccttggaaaagttcggcaacaattttctaagccagggactggcaaactgcagtccatcacctgtttttgttgttgttgttgtttgtttgtttgttttgagatggagtctcactctgttgcccaggctggagtacggtggcgcgatctcagctcactgcaagctctgccttcctggttcatgccattctcctgcctcagccttccaagtagctgggactacaggtgcccgccaccatgcccggctaattttttgtatttttagtagagacggggtttcaccgtgttaaccaggataatctcgatctcctgacctcgtgatctgcccgtctcggtctcccaaagtgctgggattataggcgtgagccaccgcgcccagcgctgttttttgttttttgagtttttttgtttgtttgcatacgctgaaagctaagaatggggtgggttttttacatttgtaaatggttgaaaacaaatatttggtgacacacaaccattctatgaaatttgcattttacagtctgcaaataaggttttgtggcaggacagctcgcctgttcatttatgtatcaccttcggtggttcccaagctacatctttgcttttggttttgttctgagacagaatctcgctctgtcgcccacgccagagtgcagtggcgtgatgtcggctcactggagactccgcctcccaggttcaagcgattctcacgcctcagcctcccgagtggctgggattacaggtacctgccaccatgcctggctaattttttttagtagagacggggtttcaccatgttagccaggctggtctcaaactcctgacctcaagtgatacacccacctcagcctcccaaagtgctgagattataggcatgagccaccgtgtctggctcaagctacatttctggttggcagagttgagtttgcagcattacaaagcaagtttgccaacccctgaacgaggttatctggtagcaagcaaggtgagtggcttatcatgtcctgcaaatcaataaaccccttacaaaaaaatgaccttgagcaatgagagttccaacagcgtctaatttcctgaatgtcactttataatcacagaaaactttgcacaaataataacaatggttagcattaccgtatggagcacttacactatcccaagcactgtaagtgctttattttgtttttatttagattttttaaaaatagagacaaggtcttgctatgttgtccaggctggtctcgaactcctggcctcaggtgatcctcccacctatgcctcccaaagtgctgggattactggtatgaactactgagcccggtctgtaagtgctctaaaccgatttcctcattcagctttgtaactctgtagacactagcactttctctctttcacagatgaggaaactgaggcccagagaagttaagtttttgctcaagtcagggtttgaactcacagcctgagcccccgatcaccaatccattggcatatgatgcccttttatttttatttttatttatttattttcagatggagttttgctctgtcacccaggctggagagcagttggcaccatcccagctcactgcaacctccgcctcccaggttcaagccattctcctgcctcagcctcctgagtagctgggattgcaggcatgcgccaccacgcctggctaatttttgtatttttagtagagatggggtttcaccatgttggccaggctggtctcaaactcctgacctcaggtgatccacccccctcagccttccaaaatgctaggattacaggcatgagccaccgcgcctggcctgccctttgatttttaaaaaatatacttttaattttatatttacaggaaagtacaaagaaagcagagagagtccctttaagccctccttcccagcttctcctcatgttatttttaatttttttgagacagagtctcactctgttgcccaggctggagtgcggtggcacgatcacagcttactgcagcctcgacttcttgggctcaagagatcctcccacttcagcctcccgagtagcagggactacagtctcgtagcaccacaccaggctaattttttttttttttttgagacagagtctcgctctgttgcccaggctggggtgcagtggcgtgatcttggttcactacaacctctgcctcctgggctcaagcaatcctcccaccctagcctcccaagtagctgggactagaagtgcatgccatcataccaggataatttttttttttttttttttttttgtagaaacagggttttgtcacattgcccaagttggtcttgaactcctgggctcaagcgatccacccacctcagcctcccaaagtgctgggattacaggtgtgagccactgcatccaccctacattttcttccttccttccttccttcttccttcctcccttccttccttccttcctttctttctttcttatttacttatttttttttttttgagatggagtcttgctgtgtcacccaggctggagtgcagtggcacaatcttggctcactgcaacctccacctcctgggttcaagctactctcctgtctcagcctcccgagtagctgggattacaggcgtatgccaccatgcctggctaattttttgtatttttagtagagacagggtttcgccgtgttggccaggctggtctcgaactcctggcctcaagcgatccgcccacgagtcgtgacatccagcccactctcagggtggtgggaattaagctctttctcctggagacatcatttgattttgatttgcaggacaaccctttgaggtcaagaaagatttgagtttgtgtgaaagaaatgatgtggggccgggcgcggaagctcactcctgtaatctcagcgctttgggaggctgaggcaggaggatcccttgagttcaggagtctgggcaatatagtgagaccctcgtctctacaaaaaaaatgtttaaaagttagccaggtgtggtggcactcgcctataatcctagctactcgggaggctgaggtggcagcattgcttgagcccaggtgttcaaagctacagttagctatgatttgccactgccctctagcctgtgccacagagcaagaccctgttcctaaaaagaaaaaagaaataatgtgggtaaaggctgggcgtggtggcttacacctgtaatcccagcactttgggagaccaaggtgggaggatcacttgaggtcaggagtttgagaccagcctggccaacatggtaagaccccatctccattaaaaacacaaaacaattagcggggcatggtggcacatgcctgtaatcgcagttactcaggaggctcaggtgggaggatcccttgaacccaagaggtggaggttgcagtgaggcaagattgcgccactgcacttcagcctgggtgacagagcgagactctgtatcaaaaaaaaaaaaaaaagaaaaaagaaaagaaaagaaaagaaagaaaaatgatgtgggtagcactcacttagcatgatgtctggtacacacgggcaatggtatcttgtatcatcatcatcatcctcttcattttttgttattgtcatttaaagtctttcagccagtaagcggcaaagctagcatttaaatcatagacgcttgcctctgcaaagctgcaaaaacaaataaaaataataataaatcacagaccaagccaggtgtggtggcttacgcctgtaatcctagcactttgggaggccgaggagggaagatcacgaggtcaagagagggagaccatcctggccaacatggtgaaacaccgtctctactaaaaatacaaaaattagctgggtgtggtggcgcctgcctgtagtcccagctacttgggagactgaggcaggagaatcacttgaacccgggaagcagaggttgcagtgagctgagatcacaccactgcactccagcccgttgacagagtgagactctgtctcaaaaaaataaataaataaaataaaaataaaaaaataaatcacagaccctaaccctgttctctgacaacaaacccctccccacctgtgtcaggaggcatgaaggggccaaaacacccatgtctcattcccagcaggctgagaaaagtcctcccaaggtataactccccacaggcctacctgcttttaaaggtattcaaagtcaacgtgacagtctgtcccgtttcctcccgtccgtgggacagacggaggaaacagcctcacagtaagttaaacaaacagaacagagaatgagtcatactccaggtaattagagaaggtgggtctccacgataaagttgggatgcttttcagagaacagacaccacgccagacagtcctgttcctggccttgacctttgaggctgtttataattcaaccccacctatccctccacgcttctctcccactactcaggttctccggactccacggcccagtcaccctgaagtctcatggctgttcatacacgtcatacacatacgctgtgccttgctcatccagcgctgttcctggaactccctctcccacctaactcttactcatccttttaagacaaagcccaggcccacttcctccaggaagtcggaattaggctggataagtgtctgaatgtctcttaggccagttgctctcagccaaggaaacatctggaggcatttttttcaggaccaggggagccactggcatctaggaggtagagaccagggatgccgctcaacaccctccagtgcataggagaccacccctgccaccaccaccgagaattatccagccctaattgtcgaaagtgccaagctgagaaaaccctgctctgggcctaagctccttgcatctccttagctcctagcgcccctggtccatgctaaagactcataaatgaggccaggtgtggtggctcacgcctgtaatcccagcactttgggaggctgaggcaggcagatcacctaaggtcaggagttcaagaccagcctggccaacatggtaaaaccccatctctacaaaaaatacaaaaattagccagatgtagtggcgggtgcctgcaatcccagctactcgggaggctgaggcaggagaattgcttcaatctgggaggtggagtttgcagtgagccaagatggcaccactgcactccagcttgggcaacagagtgagactccgtctcaaaaaaaaaaaaaaaaaaaaagactcataaatgcagaatggttggatggataaaagaaagatgggagatgtttctccttcctagttgtctctgagaaagttggtttctatgtttaggggagggctgtgtccacctgaagtttcctataaccaagatagctatagaaataaggctgatggccagacccagtggctcacgcctgtaatcccagcactttgggaggccagggtgggaggatcacttgaggtcaggagttcaagaccagtctggccaacatggtgaaaccctgactctactgaaaaaaaaacaaaaaaaaaacacaaaaattagccaggcttggtggtgcatacctgtaattccagcactcgggaggctgaggcaggaggatcacttgaacccaggaggtggaggctgcagtgagcctagatggtaccactacactgcagcctgggtgacagagtgagactctgtctcaagaaagaaaaaaaaaaaaaaagaaagaaaaagagaaagaaagaaataaggttcaaaggccgggcatgatggctcacacctacaatcctggcatcataggaggcccaggcgggcagatcacttgagctcaggagttcgagaccaatctaggcaacatggcgaaactctgtctctacaaaaaaattagccagacgtggtggtgtgtgcctgtggtcccagctacttgggaggctgaggtgggaggacaacttgagcccaggagatggaagctgcaatgagctatgattgtgccactgcacttccagcctaagtgacagagtgagatcctgtctcaaaaaaaaaaaaaaaaaaaaaaaaaggaaaaaaaataaggttcatgcccctaagtccataagccacagctacacagctgcccaaccattgagccctcataaactcccgtgttagagtttctgacctcagctgcagtagggtgcctggtgaattacgtcttgcatttctgggacatccaattccctgaacatgctcccttcctctggaccatgaaggttggacttgaactgaaggctagtccacctggggacgcaaccctccagcttctgaactggggactctcaacaacatattgtgcatgttttgaagtgattgggtttggggaaatctttttttctaaaatagagactgggtcatgcgaggtttcccaggctgatctcaaagctcctggactcaagtgatcctccctcctcagactcccaaagtgttaggattacaggcatgagccgtcttgcctggccatggggagatcttctaggcctggctgaccagccaaccttggtgagagctgttctgctcgactcctggttactgttcaactgcctcccctgtggcaggacttggattagacaggcaacctcaagactggggtgtctgatggcaattgagaggttgctggtgctgggggaagcatctggcctatccacatctgccaaatagcacctgtgtggaagtggataggggagggtatggtatgtgtttcagactctgagcacctgtttgagggtatctgacagcatctgtattggggttatctagtatgtgtttgggggtatctgctggacctatgtggagtgtctgacatatttgggggttacctggaagcctgttttgggtatctgatggcacctgcctgggtgcctgtgtttaggggatctgatggtatctatgttggggtgtctgagaccactggagaggtatatgattcatttttcccagacccacctttctgaagtctatgctgcctctttttttgttgttgttattttgagacagagtcttgctctgttgtccaggctggagtgcagtggcatgattatagctcactgcagcctggacctcccaggctcaagtcatcctcccacctcagcctctggaggcatgatcatagctcaccgcagcctggacctcccaggctcaagtcatcctcccacctcagcctctggaggagttgggaccacaggcaggcgcctccatgccctgctcattttaaaaaatgttttgtagagatggggtcttgctatgttgcccagactggtggtcctgaactcctgggatgaagtgatccccccaccactccctgatgctgcttcttttttctcaggtgacagaccctgccctctccatttcttggactctccccgctaggactccccaccactgggagtgccccccttaggtacttccaatcctaacgagcccgtaggagcccactgacaacccctccaggcatccgttgattcttccaaaacacccccagctccactgtcctcccttggggtccccttaaccccgctatcctccctcggggtcccccaactccgctgtcctccctcggggtccccccaaccccgctgtcctcccttggggtcccccaaccccgctgtcctccctcagggtccccctaactgtgctgtaccccccttgagattctccaaaccgctgtcctcctcaggactccctccccagccgcgctaatcacccaggcttccgttaaccccacaaaacgcccacctaaccctgctgctctccctctggatccccgcaacccagctgtcccctcagagcccccggccctactgacagccaggctcgcattgctctccttcaaaaagccccccaaccccgctgacccgcccctcaaaagtcgccctcaccctcgccgcgagcaccctcccacttcggtgcccgcgcccctctcaaggccgagccgacgccccctcaccacggctcggggagcagcagccccaggtccccgggagcgccccgccctcgagggcacgcctccttccgggtcacgccctctgccccgcctccgaggcgggatcgcgcatgcgctgctctcctcgcgcggcttcccgcttccggctcccagctgctagctactgtggatctgggggggccggacggaggcatcggaggcggctgcgagagtggcagaggagctggcggagagcggcctgcgggcgatcgggccgaggtgaggacggcggcggggcggtcccgaggaaaacggggctcaggagggggccctcggtctcttcagggggtggcctggggcgcgggacccccggggctgcctcgggcctcccgccggctcctgggggacttctccaggcaggcgaacgggtgctggggtgcaggctgctccttcaatgcatggaggctctaggcggcgattgcagggtgcagaggtgcagacgatgcccgcccgctccgtccgagccccagccagtcctggggtgctacggcttactctcctccaggagaggagaggaggggtcacttgggccccagcctctgctcctcgttcaggagcgcccggggcaggaccagggatggaatggaacccaccacaatacccagcaccgtcgtatttcaggcctcccgggagaaccctcacaccccggagcagacagccctccctggcagggagcgtttgggtgcaaaaccgtgagaactatctgtgccatgggttttagtttcttgtataagaactcagttggtgctttcattgcggacgggaacgagaagctttcccctggtccttacatgtttcgttttgttttacgtttttaaatttcaacttttatttgagattgagggggtacatgtacaggtttgttacctggatatattgcgtgatgctgaggtttggggtgtgactgatctcgtcacccaggtactgagcatagtactcaatagatagtttcaacccttgacctcctccttcccttcccgctctagtagagcccagtttctgttgtcttcttggtgtccatgagtacccaaggtttagctccacttacaagtgggaaagtgcagtatttggttttcttttcctgcgttaattctactagcacttgagtgttttgctgtggctatctgccccttatctcttgctctgttgagattaaagcctggaccacaggattaaaaaacattcttaaagttttaccacggaagcgaagcggccaacacaccttttcccctttgccttgttttcgcggagatgaagctccagccagtagctttgaagggccccattctcttcccattgaccagagagagagttcaggacagtatagacagcccagtggccaagggatgagttttgcaggtgtctgagtgaatgattaatcctccagctgtaagaggtgtcaggagaggctgggcgcggtggctcaagcctgtaatcccagcactttgggaggccaaggtgggtggatcacgaggtcaggagatcgagaccatcctggccaacatggtgaaaccccatctctactaaaatacaaaaattagccgggcatggtagcgggcgcctgtagttccagctactctggaggctgaggcaggggaatcacttgaactcgggaggcagaagttgcagtgagccgcgatcgggccactgcactccagcctggcgacagagcaagactgtctaaaaaaaaaaaaaaagaagtgtcaggagcacaggcttgaggtcagatccgagctgggttctggtcccagttccaccacctgttagccgtgtaacttcactaagtttccgtcttcccatctttaaaatgggaataagggttggttggggtttctatgaagtaatctgtgtaaggtgcatcacagaagtgtctggcatatggcaaactttccatcagtgttatacaccctttgcatatgcgaatgctcccaggcttggatgtttaggttaacattccaaattataaagagtttggaaaatttgagcatctcggatgttgtttggaccgagtcagggtttacgctttatcagtagtttcctatttctgtaggtcagcaagcctttttgcgaaaaaaaaaaaaaaaaaaaaatgaagatgtgtttgttctagagcaaaaaagagcaaacagctggcaggcataatacatttcatttttgtaaacgttactttgttttggttttgtatagcttatttagtttttgttttcttctgaaattagtatgtgattttacttaaaattttttttttctttttagagacagggtctcactctgttgcccagactggagtgcaatagcacaatcatagctcactacagcctcgaactcctgggctcaaataatcctcctgccacaaactcccaagtagctgggactacagacacgcgcttccatgtctggctaatttttaaaaattttttgggccgggtgcggtggctcacacctgtaatcccagcactttgggaggcccgggggggggcagatcacgaggtcaggagattgagaccatcctggctaacacggtgaaaccccgtctctactaaaaatacaaaaaattagctgggcatgatggcgtgtgcctgtagtcccagctagtcaggaggctgaggcaggagaatggcgtgaacccgggaggtagaggttgcagtgagccgagatcgtgccactgcactccagcctgggcaacagaacgagattccatctcaaaaaaaaaaaaaaattttttttgtggggtctcgctatgttgcccaggctggtcttgaagtcctggactcaagcgatcctcccacctcggcctcccaaagtgctaggattacaggcgtgagctgccacagcctgtggtttttgtttttgtttttttaactgacagataacagtgtatgtatttatcatgtgcaacgtgacatattcttgaaaaatgcaagaggagcggatgttaagcactttcaccacaaaaatgagagctatgcgaagtgctgcatttgttactaagctagatttaatcatgccactgtgtatatatacttcaaagtgtgtttcctttttctttttccttttgttttttgagacggtctcgctctggcgcccaggctggagtgcagtggtgtgatcttggctcactacaacctccgcctcccaagtttaagcaatttcgcctcagcctcccgagtagctgggattacaggtgtgtgccaccacgcccagctaattttttgtatttttagtagaggcggggtttcgccatgttggccaggctgatgtcgaactcctgacctcaggtaatatcccctccttggcctccaagagagctgagattacatgcatgagccaccacgcccggtcatatttcatttttaaatggcataccttagagaagcagaaaagagaccgggcaccatggctcacacctgtaatcccaacaccttgggaggtcgaggtgggcagagaggccaggagttcgagaccagcctggccaacagggtgaaaccccatctctactaagaaatacaaaaattagctgggcgtggtggcctgcgcctgtaatcccagctacttgggaggctgaggcaggagaatcgcttgaacccgcaaggcagaggttgcagtgagccgagatcacgccattgcactccagcctgggcaacagagctagactctgtctcaaaaaaaaaaaaaaaaataaagaaagaaagaaaagagattctttggttccttctctctttcttgcttaaatcgacttgagaatgtccccactttgaaaggggaagtagcacatacattgtttctggcatagctgtagtataattttcattcttgtcacacagtagcaattacggcttcaaggccattgccctttgtgggccagggccgtggtgactggctgtgcctccctgggtgtttacctagcacatgtttaacatagctcagatcgtgtgtcaagatctccctcattctcactcatcctgggtcatgtttctatctcttcaaactctatgacttacaaaacatttttgctgccacctctctgaaaatcatttaaaagcccagagaccttatatgaagtccagccaatcgctgtttctttgttatttgttaggtaaactttactttccccctgagacggtcaagaactactgtgtttgaaaaccctctctctaggtgcaaaacagcaccagtggaagcctcgcagctgcctggaggaattttttgaggggaggattgtggctgactgggtgagggagggaaactgggtaaaataatgtcctccgagagcattcggtgacagcagttgttctcatttttgtgatgcaaattaagttgtatgtgaactaaattaaatttgcttgcttctctgcttttgtcagagatagattcatagtttcaactgagtatagagttctagtctgattatgttcaatatgttcaaagcagtagatacactaatgtttttttttccttcttttttttttttgagacagagttttgctctgtgccccagcctggagtgcagtggcgcgatcttggcccactgcaagctccacctccgggttcacgccattctcctgcctcagcctaccgagtagctgggactacaggtgcctgccaccacgcctggctaattttttgtatttttagtagagattgggtttcaccgtgttagccaggatggtctcgatttcctgacctcgtgatccgcccacttcgcctcccaaagtgctgggattacaggcgtgagccaccacgccttttttttttttttttgagacagagtttcgctcttatcacctgggctggagagcagtggtacgatcacagctcactacagcctcgacctcctaggctcaagcaatcctcccacttcagcctcccaaggagctaggactataggtgcgtaccaccgcgcccaattaatttttgtatttttgtgtgtgtgttagagatagggttgcccaggctggtctcaaactcatgggctcaagcgatcctcctacctttgtctcccaaagtgttggtattatagatgtgagtcaccatgcacggcttcatacactgatttatggtcatatattgaaaaaatatatattctaaaggtttcactaacagtacacgtttaacacattgtggatggtggatggttacatttttaattcacgtcacttttttaatacagcagctttattgaaatataattagcacagcataaaattcaccttttaaaagtgtaccatttggtgtgttttaggatattcacagagttaagcaacagtcatcagtatttaattccaggacatcttattatttttttaaaaaaacagggtcttgctgtgttgtccaggctaaatgcaaactcctgggttaaagtgttcctcctgccttagcctcctgagtagctgggactacaagcatcagccaccatacctggctcagttcatcattcttatgggtgggtttcaggaggagagaaagtgaaaagagggagttggtctggagaaagtctcagctcaaaaatgaaaacaaaaattggccgggcacagcagctcacacctgtaatcccagtactttggaaggctgaggcaggaggactacttcaggccaggagttcaagaccagcctggatagcatagcaagaatcctatctctacaaaaaattgaaaaattggcaaggtgtgatggctcacacctctggccccagctacttgggaggctggaatggaaggattgcttgagccttgggaggtcaaggctgcagagagctgtgattacaccactgcactctagccttggcaacagagcaagaccctatctctaaataaataaatatttataaatgaaaagagggagtcctgagcaggtgctctctcattgcagtgtgggatggaaggaggggaggaccatgtcagattacttggcaggaatctagcatcatcttgcatacagggacatcccagttacactctgtgtagggatacctctaatttgctgacgtttcatttgaagagcaaaattgaatttagaaaccatagtaagttgggaagttatccacaatggggattactggactcattagttcccttacgggggtgaaatggatagtgacggaccaggtagaatgtagagcaaaggatttcagcatccttgggcgctggaggcagcaagggatcagctctgtagcgctgacaatgccagggtgtggtggccagtggtgggtccgtgtgaccctttgtgatgtccacttgggggctcctaaccaatgaggttttgtttgttttggttttgagtcagggtcttgccctgtcgcccaggctggagtgcagtgtcacaatcatagcccactgcagcctcaacctcctgggctcaagtgatcctcccacctcagcctcccaaatagctggaaccacaggcacacaccatcacgcctggctaatttttttttattttttggagagacaggggtcttaccatgttgcccaggctggtcttgaactcctgaactcaagcaatctgcctgccttggcttcccaaagtgctgggattataggcatgagccattgtgcccatccctaagagagatgggaagatggaaaaattggaaccctcatacactgctggtgggaatataggttggtgtagctgccttgggaaacaggcagttcctccaaagcttaaaccttgagttaacccagcaattctgttcctctgtaggttcctaaggcaaatgaaaacataggtctacacaaacacttgcagaggaatgttcatagtagcattattccaagtagccagaaagcagagacaacctaaatgttcatcagctgaggaacggatacataaaatgtggtcccgccatactgtggaatattacttggccatgaaaaagaagttccgatacagagatggacctggaaaaaacttgctcagtggaagaagccagtccccaaaggccacctgctgtatgattccatttatatgaaatgtatacaacaggcaaatccacaaggacagaaagtggattagtggttgccacaggctgggggtagtggagtggggagtaatggccaaggtaatggggtttctttttgaggtgatgaaggcattctaaaattgactgtaggctgggcgcagtggctcatgcctgtaatcccagcactttgggaggccaagacgggcagatcacaacgtcaggagttcgagaccagcctggccaacatggtgaagcccaatctctactaaaaatacaaaaattagccaggtgtggtggtgcgtgcctgtagacccagctcctccggaggctgaggcatgagaattgcctgaaccccagagacggaggttgcagtgagccgagatcctgccactgcacttcagcctgggcaactgagcgagactctgtctcaaaaaataaaatgaataaatacataaaatagattgtgatgacagatgcagaactctgtgaacatactaagaaccattgaattggatgctgtcaaagggtgagttgtgtggtatgataattctatctcaataaagcagttacaaagagaggaagagatggaataagaactggaagcacagtggcaatgggacagaattttaaggaatggtttgagactgagtggcaggaagactggggggtaaagctaagagaaccctaaaggaaaggggaccagcttgccccgtaagtggtgtggggctaggttaatagattgcctaatgcccaggagatgtcagtgtgcccatgcgctggtccctgccatgtaggaccacgtaggagaaggttacaaagtgtgtctgtaccatccagtgtgacaaagtgagagcctcggagcaggtatagcccaggcatgacccagaaagccctcttgaccagctgctgctggccaagataattatatgatcacaatttatgttatattatagcaaatttaaaattgggataatgtgattcacataccacagaactcacccttttacagtgtacaattcaatgtgtttgttttgtcttttctgagacagaatctcactctgtcacccaggctagagtacagtggcgcgatctcggctcactgtaacctccgcctcctgggttcaagcaattctcttgcctcagcctcccaagtagctggggctacaggtgcaggcctcctgacctcaagcaatccgcccgccttggcctcccaaagtggtgggattacaggcgtgagcccaccacacccggccaaatcagtgatttttactatgttcacagagtggtgcagctgtcactactataatttcagaacattgtcatcacccacaagaaaagctcacacccatagctttcactgcccattcccccatcctcccagcccccagcagccacgaccctactttctgtctctagatctgtctattctagacttttcatatcagtggaatcttacagtatacttgatgtattaatgtgacttcttttacttagcataacgattgcaaggttcatttacgttgttgcctaaacttagctttttctttctttctttctttctttcttttttttttttttgagacggtcttgctctgttgcccaggatagaggaatcacagctcactgaagccttgacgtcctgggcgcaagcaatcctcccgctttgtcctcctaagtagctggcactacaggtgtgcgccaccgtgcccggctaattttttattttttgtagagatgaagcctcgccgtgttgcccaggctggtcttgaactccttggctcaagagatcctcctgctgggctcaatgactcacacctgtaatcccagcactttgggaggccaaggcaggcagatcacctgaggttgggagttcaagacctgcctggccaacatggcaaaacctcatgtctactaaaaatacaaaaattaaccaggcgtggtggctggtgcctgtaatcccagctactgatgaggctgaggcaggagaatcacttgaacccgggaggcggcggaggttgtagtcagacgagattgagccagtgcatgtcagcctgggcaacagagcgagactccgtctcaaaaaaaaaaaaagagatcctcctgcctcagcctcacagagtgctgggattagaggtgtgagccactgcacctggcctagttatttgtaatctgtaagaagaaatgtgaaggaatagtaaggagcaccttgccagaggcaggtacgggctgccctggggccgtttcactgagttgacctgaccttgtgtgttcattgttgatcccttccctgtcctggctccagggagccagttagatgctcgaggggcttctcgggctgcgttctctgttgtcctgtaaataccgactgatctggataacagttgtcaagtcacaaaaaagagaaacacagttaggtagaaacccaaagcaaacccgctctgtgaggctgaggcaggaggatctctctcttttttttttttttttttttgagatggagtctcgctctgtcacccaggctggagggcagtggctcaatctcggctcactgcaatctccgtctcccgggttcaagtgattctcctgcctcagcctccccagtaactgggattacaggcgcccaccaccacacccggctaatttttgtatttttagtagagatggggttttgccatgtctctattaaaaggccttttagatagatcgtggagctaatccgacctgaacatcccagtcctggagtattttagcatgaggatagctctctattggtctggaaggttcgcctgatggttgggcctgaagacaggggcctcagggactctcttgtagctccttcagatgggtgcttttgttttgaccaaaaacagaacattctataccgtgatccaatgggcacacgtacaataataggatgcaaagtgttaccaaaccgaactcacctttattgtgtgcgacagactcgggtgctttatttttatttttatttttttgagatggagtctcactcacccaggctggagtgtaatggcatgatcttggctcactgcaacctctgtgtactgagtttaagagattctcctgcctcagcctccccagtaactgggattataggtgcccgccactatgcccagcttattttttatatttttagtagacacgaggtttcaccatgtcagtcaggctggtctcaaactcctgacctcaggcaatccgcccgcctcagcctcccaaagtgctgggattacaggcgtgagccaccgcgcccagcgacctcttccaacttctaaaaggtggccctagggattcctcggcttgtagccatgtcattccacaccctccgtggtcacgtggccttcacctgtgtgtgtgtttcccctctgtatctgtgtctctaaatctccctctcctttctctacacagacaccagtcataggctctagggcccaccctaaatcgaaatttcatcccgagatccttaactaatgacctctgccccaggctctctttccaaagaagtccatattccagggttcttagtggacgtgaattttggtgggacactgttcagcccacttcaggaacctcctatttctagcgatttgtaaacaacaaatttgttttgttttagtttttgtttttgaaacagggtcttgctctgttgcccaggctggagtgcagtggtgcgatcatagctcactgcaacctctacctgccaggctcaagcaatcctcccgcctcagcctcctgagtagctgggaccacaggcatgcaccaccacgcctggctaattgttggtttttgtaatgctgttttgtagagatggggttccaccatattgcccaggctggtcttaaactcttgggctcaagggatcctgcttcagcctcccaaaacaccgggattccaggtgggagtcaccattcccagcctagaacaagtttacaagctattggcactcatttcttaggctctttacaacacagtgattttccagtattttgaagttgaagtaaatgtagaaggtctcactctttagaaccagttaattgcagagaggaaagaggaggtcttcaggagaacaccagattctttttgttgttgttgttattgagacggagtttcgctctgtcacctaggctggagtgcgttggcgctatctcggctcactgcaacctccaccatccgcttgggttcaagcgattctcctgcctcagcctcccaggtagctgggattacaggcgcgtgccaccacgcttggctaatttttgtatttttagtagagacagggtttcaccatgttggccaggctggtctcgaacccctgacctcaggtgatccacccacctcggcctcccaaagtgctgggattacaagcgtgagccaccacacctggcctccagattctttttgaaaagcttctaaatctgaattctctgtgaatataatttgccaaaacgtatgagtaggaatctgatattacagtctgtcaaatgtctggccgtgtgcctatactccatataatcttttccttcccctgcattcagataccaccttcatcaaacacaaaagtgttatagattcagagagggcaaaaaacaaagctgtaccagctgccttcccctgcacctagcttacgagctgaccttgagacacaggatatgttaaaatatattcaagctcacactgttgcagttctaaaaggaatgctaatgaaggtctttgcaaggttctggaattttcctagcgtaggagctggttgctgacttatattaatagttatagccacctggcacagtggctcacgcctgtaatcccagcactttgggaggccgaggtgggcggatcatgaggtcaggagattgagaccatcctggctaacacagtgaaaccccgtctctactaaaaaaaaacaaaaaaaaacaaaaattagccgggcgtggtggcgggcgcctgtagtcccagctacttgggaggctgaggcaggagaatggcatgaacccgggaagcagagcttgcagtgagcggagatcgtgccactgcactccagcctgggcgacaaggcaagactccgtctcaaaaaaaaaaaaaaaaaaaggttatagccatcatactcaggatggtagggaacttgagatgctcagaaaccaaccactggccaggcatggtggctcacgctggtaatcccagcactttgggaggccaaggtgggtggatcacctgaggtcaggagttcgagaccagcctggccaacatggtgaaaaccccgtctctactaaaaatgcaaaaattagccgggtgtggtggcgggcacctgtaatcccagctactcaggaggctgaggcaggagaatcgctggaacccaagaggtgggggttgaagcgagccgagattgagccactgtaccccagcctgggtgacagagtgagactgagtctcaaaaaaaaaaaaaaagaaaccaacctctttgctacttgtttgtggcctgtttgctcccagcatgggcaatttcaagcgtctggaattcagtaatgactttgcacagcgaatccactttgccactccttttattccggttccttctgcacatcagggatagagcattgggagttcccagactgcatgagcccagctggttgcatttgaattcttggaaataggctctcccttccagaacaaaccaattagatatagtaggccaggggccagcaaattttttctgttaagagctaggtagaggccgagacgggcggatcacgaggtcaggagattaagaccatcttgactaaaacggtgaaaccccgtctctactgaaaatacaaaaaaactagccgggcgtggtggccgcgcctggagtcccagctactcgggaggctgaggcaggagaatggcgtgaacccaggaggcggagcttgcagtgagccgagaccgcgccactgcactccagcctgggcaacagagcgagactccgtctcaaaaaaaaaaaaaaaaaaaaaaaaaagaggtagtaggctgggtgcagtggctcacgcctgtaatctcagcatttcaggaggcagaggtgggcagatcacttgatcccaggagttggagaccagcctgggtaacgtggtgaaaccccatctctactaaaaatacaaaaattatccaggcattgtggcttatgcctataatcccagctacttggggggtgagacaggagaattgcttgaactcgggaggttgaagttgcagtgagccgaaatcgcaccactgcctccagcctggatgataaagtgagaccctgtttcaaaaaaaagagaaagagccagataataaatatttcaggctttgcagcccacatagcctctgtcacagccactcaactcaaaagaagccacagacaacagagaaacaagtgggcgtggccgtgttctgataaaattttatttacaaaaacaggtggccagcccacagacagtaggggttcaccagcccctacagtagacgcatcatttttacagttctgtttctagggccacaatggtctgactaaatttggcgagggatgcgggttagggaacaggaggccctcacctgtctcatgagcttagcagctgtgtcccaggttgacctcttcacaatctgggcccatccatgagcagcagctccctgaggggcccctctttatcctgcagtgtgttttctaagggagtaatgatctgttgtggtatttgcaagcctgggggtgttcaacatagagtttgagtccccccagatgaaaacaacaagaccggctgagtgcagtggctcacgcctgtaatctcacactttgggaggctaaggcgggaggatcacttgaacccaagagttcaagaccagcttgggcaacatagtgagaccccatctctacaaaaagaaatatataaacttacacacgcgtggtgactacaggtaggtagtgtgcacctatagtcccagctacttgggaggctgaggcaggaagatcgcttgagtccaggagttcgagactgcagtgagccgtgattgcaccactgcattccagcctgggcaagagcaagaccctgtttcttttttttttttttttttttgagttggagtctcgctctgtcgcccaggctggagtgcagtggcgtgttctcggctcactgcaagctccgcctcctgggttcatgccattctcctacctcagcctcccaagaagctgggactacaggcgcccaccacctcgcccggctaattttttgtatttttagtagagactgggtttcaccatgtcagccgggatggtcttgatctcctgaccttgtgatccaccgcgtccggccgaccctgtttcttaaaaaaaaaaaaaaaaaaaagacttaatggcagtcccagtccatgctatggaaaggttggcctctgtgagagtttggattagattggaaactaatgaagagtcttttttttttttttttgagttggaggccactctatcacccaagctggagtgcagtggtacaatctcggctcactgtaacctccacctcctgagttcaagctattctcctgcctcagcctcccaagtagctgggattacaggcgcctgccaccacctccagctaatttttgtatttttgtattttttagtaaacacggggtttcaccatgttggccaggctggtctcaaacacctgaactcacacttgagccaaggcccacctcggcctcccagagtgttgggattacaggcgtgagccatcgcgcctggcctgtgaggggtttttctttctttctttcttttttttttttttttattgagatggagtctcactctgtcgcctaggctggagtgcagtggtgcaacctcagcttacttactgcaacctccgccctccaagttcaagcgattctcctgcctcagcctcccaagtagctgggattacaggtgcctgccaccacacccggctaattttttttgtattttttttttttttttttagcagagatggggttttaccatgttggccaggttggtcttgaactcctgacctcgtgatccacccgccttggcctcccaaagtgctgggattacaggcgtgagccatcatgcccggcctgtgaagggtttttctaaggttcaccagccctgacatcattgcagttccctttttccagaaatgcagtgcccttgaatactttccccgcccattgaaggcaaacagggttttttctggcattctgcacacctgttttgctgccctgccttccgcctgtgactgattgcttttgatctgctgaaagagaaacccccggcctctctcaggtgtttggtttcctctgtccgtcttagagtcacctctgctgacatttatttgctgtttatttcccacattaaaattgttggcttgaaatatatatatatatacacacacacatacatacacacacacatatgtatataaatcttccagctttctggaagatttcagctatgtaactagacctgaattaatgttttcagaatcagtcttcttttcatcaaaatgtttttcaggggctgggcatggtggttcgcgcctgtaaatcccagcactttgggaggctgaggctggcagatcatctgaggtcaggagttcgagaccagcctggccaacacggtaaaaccccatctctactaaaaataaaaaaattagctgggtgtggtggcatgcacctataatcccatttacttgggaggctgaggcacgagaatcgcttgaacctgagaagcagaggttgcagtgatctgagattgtgctattgcactccagcctgggcagcagcgtgagactccatctcaaaaaaaaaaaaaaaaaaaggtttttcacccttgtcattttgatttctgcccagtcaatagaactaacataattgtttaaaaaatgccacgcactgcccttcctaagaaggcctcagggggtggaatagttttgctgggacctcttatacttcagcatctggcctgtacccagtgtcaagagaaatactcacaaggcagatgctttttcagcatctgcaatatctataggtgatattgaaggtccctccatcctgataccagaaaatagtgtgaaatttgcacaaaaggaagcagaggatctcagaacaagcctgggcagcgcagggcctctccacctgagacctggccttaggcactttcttttgtcagatatgttaaaaatgaagttgcacaccaagcttctctctttccttcttttcttcctgttcctttcccctacctcttccccttccccttccccttcccctttccctttccctcccctccccttcccttttcttttctatttcttttcttgacagagtcttgccctgttgcccaggctggagggcagtggtgtgatctcagctcactgcaacctccacctcccaggttcaagcagttctcctgcctcagcctcccaagtagatgggattacaggtgcacaccaccatgtccagctaagttttgtatttttagtagacacaggctttcaccatgttggccaggctggtcttgaactcctgacctcaagtggtctgcccacctcggcctcccaaagtgctgggatgacaggtgtcagccaccgtgcccagccaagtggcatctttttttaaaaaaatcattttttaagtgcacaggttggtggcattaaacacatacacattgctgatgctaccatcaccaccatccatctctagaactttctcctcttcccaagctgcaactctgtcctcataaaacactcactctccatccccctccccagcccttggcacccaccattctacttcctgtctctatgaatctgacaactctagggacctcctagaagtggagtcacatacgatgtattcttttgtgactggcttatttcactgagcatagtgtcctcaaggtccatctgtgtgtcagaacttccttcttaaggctgaataatattacagtgtgcgtgtatgtcacgttttgtttatccattcatctatacatgcacacttatttccatgttttgtgtttttttgtttggtttttcttttttttttttgagatggagtctcgctctgtcacgcaggctgcagtgcagtggcgtgatcttggctcactgcaacctctgcctcccgggttcaagcaattctcctgcctcagcctcccaagtagctgggattacaggggcgcgccaccacacccggctaatttttgtatttttagtgttggtcaggctggtctcgaactcctgacttcgtattccggcctcctcggcctcccaaagtgctgggattagaggcgtgagccaccgcgcccggcctatgctagggtttttaggaaccaccaagctgtcttccatagcagctgccccattttaccttcctaccagcagtgtatgagggtcctggtttctccgccttctcaccgagacacttaattttcggttttttaaattataccattttaggccaggaacggtggctcagcctgtaatcccagcactttgggagacgaaggtgggcggatcacctgaggtcaggagttccagaccagcctggccaacatggcaaaaccccgtctttactaaaaatacataaagtagccgggcgtggtggcaggcgcctgtaatcccagctactcaggaggctgaggcaggagaatcacttgaacccaggaggcggaggttgcagtgaactgagatcgagccactgcactggagcctgggtgacagagcaagactctgtctcaaaaaaaaaaaaaaagtaaataaaataaattatcccatcttagtgggtgtgaagtgggcggttttgctttgcgtttccctggtgactactgatgttgagcgtcttttcatgtgctgactggtcgtttgtatctcttctttggagacgtgtctgtttacatcctttgcccatttgtgaatgggagtatttgttttttattgttgagttggaggagtccccttactagttgcatctgacactataggatcttgcaagaactggaaagcaagtcacagtttcccgtgacctttggcatttcagccagcgaatcaggatcaaacacatggaaatagaaagcatctaaccacgtcccacaccatatttttgggggcaggatcagaagcacgcagagatattaagatagttatgggctgggtatggtggctcatgcctgcaatcccaacactgtgggaggccaaggcaggaggatcgattgagcccaggagttcaaaaccagcctgggcaacacggcaagaccctgtctctaccaaaaaaaacacaaaaaacaaaaagcttttttttttttttcttttttttttgagacagagtcttgctctgttgcccaggctggagtgcagtggcacgatctcggctcactgcaagctccacctcctgggttcacgccattctcctgcctcagcctcccaagtagctgggactacaggcgcccgccaccatgcccagctaattttttgcatttttagtagacacggggtttcaccgtgttgaccaggatggtttcgatctcctgacctcgtgatccacctgcctcggcctcccaaagtgctgggattacaggcgtgagccactgcgcccggcaaaaaaatcttttttaattagccatggtggtgtgcacttgtagttccagctacttgggagatagggagaaggattacttaagccccaggagtttggggctgcagtgagctatgattataccactatactccagccgagactctgtctccaaaaaataaacaaacaaacaagatggtcgtgaggtaatcatcttttagccatgctcatcggtggatggaagttcacaaagctgttaattaatgggctgatgttaacttagtaggaagccacccacggttctgtcctctgctgtgtctcggtcagtcatttaacttgtaatttgggaagataaagatgtagaaagcttatttatcaaagctggagatgacagacagctataggggtggctttaatcaccaggtgacagagtgagtaccgggatgcttagattcctgcgcgtgggtctaaatcagggtttcccagcctagatactgtaggcatttggggccggatcattctttgggatgggacctacctgggcactgcagggtgctgagcagcatccctggcctccacccaccagatgccaggagcacccctcttcccccctcactcccatagcaaccaaaaatgtctccagactctgccaaatgaccctgggagcaagaatcacccctggtagagaatcgttggtctagataagcaaccatataagtacaggatggggaaatagaacctcatgacagcttgtgaggaaacaacttcggggtttcagttgatcgtttttttaaaaagtcataataatactagtttgagggccaggcgcggtggctgatgcctgtaatcccagcactttgggaggccaaggcgggcagatcacctgggtcaggagttcgagaccagcctagccaacatggtgaaccccatctctactaaaaatacaaaaattaggctgggcacggtggttcacgcctataattccagcactttgggaagctgaggcaggcggatcacaaggtcaagagatcgagaccatcctggccaagatggtgaaaccccgtctctactaaaaatacaaaaattagctgggcatggtggtgcgtgcctgtgatcccagctactctggaggctgaggcaggagaatcgcttgaacccgggaggtggaggttgcagtgagctgagatcgcgccattgcactccagcctggcgactgcgagactctgtctcaaaaaaaaagaaaaaaacaaaaacaataaaaatacaaaaattagccgggtgtgggggcaggtgcctgtaatcccagctactcgggtggctgaggcaagaggatcatttgaacccagaaagcagaggttgcagtgacccgagatcgtgccactgcactccagcctgggccacagagtaaaattccatctcaaaataaataagtaaataaataaataaaataatactagtttgagccagtgattatgatacaactgtgttctcccctcccccaaaataaaaaccacgcatgccattcagctattctgctcccaagaccgctttcaacaaagctggacccaaggaccttagttccatcccttatcccattgaatctccaggcagctccattaaaccacctccctaaccctgctcctgggcactcctgggttctcccgggcttcaggtagcaccttaggcccaaatgtccaccccttgcttagagcgccctcctgagcgcaacaccccgtgccagcggctgcctgctgccgagcccgccactctgccccccacttcatggcccctgcaccgcccctctctgccactctccaccctgccctcgaggtcccggtccccctgcgtccaccagcaaccccttccagtgtgccctgctccccacgctgcagccatcgtttcgagaagcagagctcatccaatcctccacataaacctttccgtggcttcaggttcaatgacaaagtgactctccaagggcccccaaggcccatggcagaacctcctggaataagacattccctccaccctgccctttcctttctctgaccggtccagaccaggtccctcccagacgtcctctccctccctccctgaagcgcgtatttgttaagcacccacccaccacatgacaggcctcgtgccagccatgaccacagagacccgcagctcctggagtttcccttctaaataaacaaaactacagttgagccttgggatttgcagagtcagtgtttacccttttgaagatatacccaggagtagaattgctggatcggatggtaattctttgtttaattttcacccgcttgctaaaatttctctgtaaccgcaacatgaatccattcatattggtgcagagtggagaaaacttggagttcccacacaggttcccagctgaggctgagcgaggcgacactccaccttctcgttcagcctctcacactgtaaacacatgccctgttgaaggtctatggagtaccacggttttcgcatttgtgtgcttcttgttggtgatgttaatgttgaaaatgacccctagctgggcgaggaggctcatgcctataatctcagcacactgggaggcctaggcaggaggattagttgagcccaggagtttgagaccagccagcctgggcaacatagcaagaccctatctctaaaaaaaaaattttttttaattagccaggcatggtgtcacacacctgtggtctcagctacttgggaggctgaggcaggaggatcccttgattccttgagcccaggagttcgaggctgcagtgagctacgatcacgccactgcagtccagcctgggcagcagagacctcatctctaaaataacaatataataataaattttttagaaaataaaatgaccttcaaacgtagtgctgcagtgccagcaagtgcccctgagtgcaaggaggctgtgatgtgcctcacggagaaaattcgtgtgtgtgtgtgtgtgtgtgtgtgtgtgtgtgtgtgtgtgtgtgtgttttggggtggatgatattttatttgggtttttttttttttttgagacagagtcttgctctgctgccaagcctggagtgcagtggcacgatcttggctcactgcaaactctgcctcccgggttcacaccattctcctgcctcagcctcccgagtagctgggactacaggtgcccgccaccacgcccagctaattttttgtatttttaagtggaaacggggtttcactgtgttagccaggatggtctcgatctcctgacctcatgatccgctcgcctcagcctcccaaagtgttgggattacaggcgtgagccaccatgcccggctgtttttgttgttgttgttgttttttgagatggagtctcacactgttgcccattctggagtgcagtggcaccatctcggctcactgcagcctttgcctcccaggttcaagcgattctcctgcctcagcctcccaagtagctgggattacaggcacgcaccaccacacctgcgtaatttttgtatttgtggtagagacagggtttcactatgttggtcaggctggtctcgaactcctgacctcaagtgatccacccgcctcagccaccacccaaagtgctgggattacaggtgtgaaccactacacctggcctggatgatattttaaacaaggtggcctctggggcttcactgagaaggtgggcaggtcagacaagatggcttaccacctgtaattctagcactttgggaggcagagggaggaggactgcttgaggccaggagttcaagaccagcctgggcagcatagcaagaccctgtctctatttgaaaattatacatttaaaaataaaagttggcccagcacagtggctcacacctgtaatcctagcactttgggagaccaaggcgggcagatcacttgaagtgaggagttggagagcagcctggccaacatggcaaaaccccatctctactaaaaatacaaaaatcagccagacgagtggcgcacgcctgtaatcccagctactcgggagactgaggcatgacaatcacctgaaaccaggaggcagaagttatagtgagctgagatcgcaccattgtactccagcctgcatgacagagcgagactcggtctcaataaaaataaaatgaaaaagaagatggggacaggcagaaggagcagcagccacgggggcccagtgggatggtgacatgtttggaggaggccggggtgggtggagccaggtggcccaggagagtgggagagtgaaggctggtggtagctggtgaggagatagcctgggtggggccagaggtcctggactctctgtaagagaccagatggtacataccttgggctttgtgggcagcataaggtctctggtgcatatttttgctctaccaaaggaggtgctggatttggccctggggccatagtttgccgaccattcttgcaggtcacagtgaagacgggttcctggggaaggtgggggccatggcagggctttgagcagaggagggacatgcctgacttggttgttagttgaatcattccagcagctacggaggaagtgaatggtagtacaaatagtcaaggaaagtatttgctttgtgtcagacagcattccagaatgttctctatcacagccaacccccagagagggcattactggttttttgtgtttgtggggtttttttgttttgttttgttttgttttaaggcgggatctcactgtcaccccagctggagtgcagtcgcacaatcacagctcactgcagcctagaactcctgggcgcaagcgatcctcctgcctcagccccccaagtaactgggagcacaggcgtgcaccatgcttgactaattttttacttttggtagaaatggggttttgcaatgttacccagactggtctcaaactcctgggctcaagcattcctcccactctgtcagtgacagatggccactctgtcaccttcttgccacctcagcctcccaaagtgctgggattacaggtgtgagccactgtgcccagccagcaggcactacgattatccccatcctacagatgggggaaatggaggcagggtgcagttaggtccctggctctggatctcggaggtgggggtttgagcccgggcagcgtggctgcgatgtctgttcctagcacacctgccctctctgccccggcccatgtggctgatggagttgtcggtgtggattcaagggggagagagggaggagaggaggtgaaggtggcactcattgacggctcttttgagtttccacaaatacttgtttcctggagagtctttcctttcagacatctgctagtccacctggcgcctgttcagtaagcaccagggaatggaagggcctctcccttcatttctgcattgcaggtgtgtctgctctccagccccccagcagcccctcaccccaggtgcacccgcactcggcctctgtaccccagatgtacccacactcggcctctgtaccccagatgtacccacactcggcctctgtaccctgatgtacccacacttggcctctgtaccccagatgtacccacactcggcctctgtaccccagatgtacccaccctcagcctctgtaccccagatgtacccacactcggcctctgtaccccgatgtacccacactcggcctctgtaccccgatgtacccacactcggcctccgcaccccaggtgtgcccacactcggcccccgcacctgggtgtgcccacacttggcccccacacccgggtgtgcccacacttggcccccgcaccccagatgcgcccacacttgccccctgcacccagatgcacccacactcagcccctacaacccagatgtacccacacttagtccccccacaccccaggtgcacctgcagctccttcaccacagcctgggcagcccatcccactgtgaagggaactcccggcctccagcctgtctcagaaggacccctctctccctacccttgcctgctgcaggacaggcaccaccctagtcttgccctgaaacccaccctccctcaaaacccttttctcttgaagggtttccttttctccatcaggccaccctagcctaaacctcacggaggattctcccacacactccagacctgccgtcttgagcactgagttgcgtagggtgtgttgcagtcacttgggaaggtgtcgggcagggcacttttccccaggacagacttctgaaccccaagcccatgcaggtggcccttacctcttcttcatctgtgttttgaatacacaccctccaccatagaaagctgcctggagtggaagcacctggggtgcacccacacttgggctctgtaccccagatacacccacactcggcctctgtaccccaggtgtactcacactcggccctcataccccaggtgcgcccacactcggcctccacacccacactcggcccctgcaccccaggtgcacccacactcagcccccacactcacgctaagccctgacgacagcctcaggccagctgagctctcagagattggcaactaatcaaaaaaggccagctctctctatatattttagagattgggtcttgctgtattgtccaggctggtcttgaactcctgggctcaagtgatcctcctgctgcagcctcctaagtacaggtgggactggggctacaggtgtatgccaccacggccagctgagcaattattattattttgagacaggatcttgctctgttgccctggctggagtgcagtggcacaatctgcaacctccacctaccagttcaagcaattcccgtgcctcagcctcctgagtagctgggactacaggcgtgtgccatcacattcagctaatttttatatttctagtagagacgtggtttcatcatgttgcccaggctggtcttgaactcccagcctcaggtgatccgcccacctcggcctcccaaagtgctgggattccaggcgtgagcccccacgccgggcctgttttgcttgtttttaagtgacttgcttttcagtttttccaaagcatttgactctgtttcgtagaaacactcaactcttttgcacccatgggttcatgagttatgagtttaggtggcactttgtcgctcaagtgcataactttgatggcaggcagcgatggcacacacagccctgggaacaaacagtaatggctctgggtaagcacagtttgcaggcagacggctgcagagggcaggtggccctgccctgagtcacacccgtcgtggagaggagacgttatggggtgagcctgtcaaacctaagagtcttaagactctgtctgctgtgctggttcacctgggatggatggcggacagctctgttcaaaactgttttttgtttttttgtttttgttttgaaacagtcttgctctgtcgcccaggctggagggcagtggtgcagtgatggctcactgccgcctccaccttccgggctcaagtggtccttccacctcagcctcctgagtagctgggtctgcaggcgtgtgacaccacactcagctaatttttgtattttttgtagggatgtggtcccactgtgttgtccaggctggtctcaaaactcctgggctcaagcgatctgcccacttcagcctccaaatgccgttcctcaggattatgtctttgactgcagtcggcccttgaacagcacgggtttcagctgcgtgagtccagttacacacagacgtttttcagtcaatacagtcagccctctgcagccacaggttctgcttctgcaaccaaagcagaccaaaaatacagtgttctcaggatgaaaacccacagattcagagggccgacttttcccatatgccggacaactgtacccccctcttcttttctgtttctgcacatggactgctcccaaatagatatccccagctttggccggttgcagtggctcacacctgtaatcccagcactttgggaggccaaggcaggcagattacctgaggtcaggagttcaagaccaggctggccaaacatggtgaaaacccgtctctactaaaaatacaaaaattagccaggcatggtggtgcacgcctgtaatcccagctacttgggaggctgggacaggaggatcacttgaacccaggaggcagaggctgcagtgagctgagatggtgccactgcactccagactgggcaacagagtgacactccgcctcaaaaataaagaaataggtgtccccagccttgatgatggccctgactccacgcacgtctcaacagccttcaggacttctgagcagagggtcctgggtggcatttcagactgaccatgtctgctgggagagctgttctttttcccacctctgtccccttctcccttccttcttccaggtcccacctcggtggcccaaaccagacatcttcgtcatcctggcctcctccatccgtgcccgtgtttaccggggcaccaagccctgctggttctgcctctgacctcctgtcccaacttttcaccctctgccttccttaagggctttgtcacctcgcactcaggctgccaaactggttccctgcctctgtcatctctctgtccccgtctaatcatttgcctctcctatcactggttacctctgtaatgcaggtttaatcatgcctctccctgcctaaaaccttcccctggctcctattctggaagagtgtcgtagggcagcatgtaaaacgccacgcatgccccgcccagcctgccttttaatcttcatctctggccacactcttctagcactgcctgtctgcccagctcccgcccatgcccccccgccccgcgcagccttctgtcctgtaaccaccttccccacaatatgccatcattccccctgttaatggctctgcccttgcccactgtcctatcctggaatgactttccctcatccttctttcttctaatgacctcctattcatccctcaaaacccagtgcaaaggatcccatgatctcctgccttcaggcaaaatgactcaccttcctcctcaggccaccccagctcccactattggcgatcccatcatcctttgctaacacaccacctcctggatcacctgggctcctctggactggagatctcctctcaaacaccgcatcatcagtcccacaacaaaatgtgttctaacttttcttttttttttttttttttttgagatggagtctcaccctgtcacccagactggagtgcagtggcaggatctcggctcactgcagtctccacctcccaggttcaagcaattctcctgcctcagcctcccaagaagctgggattacaggcacacaccaccacacccagctactttttgtatttgtagcagagatggggtttcaccatgttggccaggctgatctcaaactcctgatctcaagtaatccgcccatcttggcctcccaaagtgctgggattacagtcataagctaccccaccaggctgttttaacttttctaaacagatgtgtaaataatttttttttggaaacatggctcatgggtcatcagtgactgtctggacagctcagggattaatagccgggaggagctaagccccagttcctcctcgttccattgtgctggggtttcatggattattactgagcccatttgcacggtccggtctgcgttcaggagaatattgtcccatctatcttcagttagctgtttgagtattcgggttgggtgtgagggagctaacagttggccccttgctctgttctcagattcttgaggtttatttcccccttgaattgtcccaacagtcctgtgaggtggatgtcatttattacttctgcacagatgactaaacaatctcaggggagcctggtcattaattggccatgatcaaaaaggtagtgaaagcacatggcagcactttgggaggccgaggcgagcggatcacttgaggccaggagtttgagaccagcctggccaacatagtgaaaatccttctctactacaagtagaaaaaattagccgggcgtggtaatgcatggccgtaatcccagctactcgggaggctgaggcacgagaatcacttgaaccaacccaggaggcagaggttgcaatgagccgagatcgcgccactgcactctagcctgggtgacagggcgagagactctatctcaaaaaaaaaaaaaaaagcacgtggcagaataagattcaaacccgtgttccacctgatgccaaagcctgtgttttggaaaagaaatgtcatgtatcaagatacccctaattctacagcccgcatccctacacttgggaaaggaaacagaggaagtcgatctagtattgatagaagcgagctgtgtgttctagtggctctagtagaagtgaacccagaagtggatctcatagaagcaagccatgtgaaaactgacacactattgatttggggtggcatcaaaaatggtggccctccactttgaggtttttatgttatttacttatttatttatttctgagatggagttttgctatttttgcccaggctggacagtgcaatggcgtgatctcggctgaccgcaacctccacctcccgggttcaagcgattctcctgcctcagcctcccgagtagctgggattacaggcgcccaccaccacgcccggctaattttgtatatttagtagagaaagggtttctccatgttggtcaggctggtctcgaactcccgacctcaggtgatccgcctgtctcagcctcccagagtgctgggattacaagcatgagccaccaccccaggccggagtttctttcttgagctagattttcttgcaaggttacacttattagcaaagtccttgggaaaagcaatttggtaatgcaagtctaaacatcagaaaggatttgtaacctttgcgtccaaaatctcgtctcacggaggctcttgtatgaaattggaatgcctcgaatgtctaacagcagggaaacgattaaagcgatacttacaaagtctatagcaacgtgaaatacttgtgtgttccctgcaactataactgaacatgtacacccgtgtcaataaagatgggggcacagagacatttgtaagtgatggtaagagtgctggtcgattttaatttaattttaaattttagttcactcttgtactattcattaagaaggctcaaatttagactgggcgcggtggctcacgcctgtaatcccagcactttgggaggccgaggcgggcggatcacgagttcaggagatcgggaccatcctggccaacatggtgaaacctcatctctactaaaaatacaaaaatttgccaggcatggtggcaggtgcctgtaatcccagctacttgggtggctgaggcaggagaatcgctggaacccgggaggcagaggttgcagtgagccgagatcacgccactgcactccagcctggtgacagagtgagactacgtctcggggaaaaaaaaaaaaaaggctcaaattcaggtaacagtgctataggtgatatttcttcatgagcccttatcagtatttcccgagagccatttcttatcagccaggaatctttgcagatgaagagtttgtaccacatttgtacttttttaagaccatgacatgcagccaactggttttatgcccaagaatgttccactttgttccgccctttttttttctaatgcccctaaggtgactcacctatagcagtttaccttagttcttatcttcattaaacaagagtagggctctggcttggtcttacacatttagagaaatgcgttctacatcaatggaaaaaaggtgggggtctccccctacttccccacaaaaaaaacaaacttttgaagttaaagcttattaagaatgggccgggcacagtggttcacgcctgtaatcccagcaattggagagggtgaggcgggcggatcacgaggtcaggagttcaagaccagcctggccaacatggtgacaccccgtctctactaaaaatacaaaaattagccaggcatggtggcgggtgcctgtaatcccagctactcaggagactgaggcaggagaattgcttgaacctgggaggtggacgttgcagtgagctgagatagcgccactgcactccagcccgggtgacagagtgagactccgtctcaaaaaaaaaaaaaaaagcttattaagaattatgagaggccgggcacagtggctcatgcctgtaatctcagcactttgggagaccaaggcaggagaatcgcttgaggttaggagttcaagaccagcctgggcaacatagcaacaccctgtctctacaaaaaacataaaaattagccagacatattggtgtgtgcccgtagtcccagctactcaggaggctgaggcaggaggattgtttgaactcaggagttcgaggctacagtgacctatgaatgcaccactgcactccagcctgggcaacagagtgagaccctgtctcaaaaataaaataaaataagaaaataggaaattagccaggcttggtggcacatgcctatagtcccagctacttgggaggctgaggcaggaggatggctagagcctagcagttggagactgtggtgagccatgactgcaccactgcactctaacctggtcaacagagcaagaccctgtctcaaaaaagaaaaaaagcagcaaagaataacctgggcgcggtggctcatgcctgtaatcccaacactttgggaggctgaggcgggtggatcacctgaggttaggagttggagaccagcctggccaacatgatgaaacctgtctctactaaaaatagaaaaattagccgggcgtggtggaacgtgcctgtcgtcccggctactcaggaggctgaggcaggataattgcttgaacctgggaggcagaggttgcagtgagctgagattgcgccagcacactccagcctgggcgacaaagtgagactctgtctcaaaaaaaaaaaaaaaagaaaaaaagcaccaaagaatgatgagaatttactcttaggtagtacaccagacacctaatcgacgtctagtgatttgggcaccagaatctagctctctgcctgcctttcccacctccacctcagttttccccttatgcaaaatcacgtagtattttcctatgtcacagaaatgccgctgccgtggctgagagaacgtttgctcagaatggaatgcttccaccaggataaaggccttaggatgtggatatttccagctagcagcaagtgtgttttgtactgtgaagcatcccttacttttaggacgagactggtcccaggaggaaaagtggcgtcgattggtttccatggagaatgcagtttctcactgtggactcttgagttcttagttatgctgtcaaatattctaaaatcataggtcacctcgccgtgttgaaaggttctacagagccttctgagtctcagagaaagttaagtttgaattcttggggtggaggagccgaggtcaggcactttggggttagaggtgaccctggcctcctttttccctctcgtaagctcgaggtggggaaaacccagaacccccactgcaggcaagaatgtggttccatctggcctttttgctgtcgcagaacctgccaggaaaggcgcacacaggatgttttagggcccaattcaccgcaggctcctggagagcccccagtgaagaaatgagtctcactgaggtcaaatgttgccccagctgcctcactttcgcaaggtgggcccaacggcaagtgtgtctacccagtaccctggaggggggatgtctgtgggcttcatgtgtccaggcattgtccagaaaaaaagggctgtcttggccaggcatggtggctctcgcctgtaatcccagcactttgggaggccgaggtgggaggattgcctgagcgcaggaaggagttcaagatctgcctgggcaacatagcaagaccgtgtctctacagaaaatacaaaaatcagccgagtgtgggagtgtctgcctgtagttccagctacttgggaggttgaggtgggaggatcactggagcccaggaggtcaaggctgcagtgagctatgatcacgccactgcactccaacctggatgacagagggagaccctgtctctaaaaaaaaaaaaaaagaaggccgggcgcagtggctcacacctgtaaccccagcactttgggaggctgaggcaggcagatttcttgagctcaggaattcaacaccagcctgagaaacatggtgaaaccctgtctctactaaaaatacaaaaattagccaggtgtgttggcacacgcctgtaatcccagctacttgggaggccgaagcacaagaattggtcgaatctgggaggcagtctgcagtgagccaagatcgtgccactgtactccagcctggatgacagagtgagactctgtctcaaaaaagaaaaaagaaaaagagggagagaaaaaaatgaaaatcacctctcttttaaaggaatagaataagagtaacagagtcaaatctctgggcaaacatgtacagaacttaaataaacagtaagaagaataagatgataaaaccagaaagtagctcaacagttaattcctgcggtcatgttgagaatgtgtaaggattttcatgtttatgtgaaactgaatgggggtgggtggtagctaagtcgaagagtcatacaattccacttaagaaatagcagtgcttaaaatgcattttttcaggcagtttttaactcaattttcttgggtaagtaacccttggctttgcgaggtagtttgtgttcccatctgtcgggccaggcgcccacttgcttcctggctatggccttccttcaccttccagcagaacctggtgagcccacggcctgttgcatggagattttctttcttctgaaatggactctcacttctctcaagctggagtgcagtggtgcgatcatagctcactgtagcctcgaactcctggcctccagtgatcttcccaccttggccttctgaagagatttttttttttaagtggaacttaaaatcccaccaaagataatggccctgaaggtggctgttgtctttaatggttcagaaggctgaggcaggaggatcacttgagcccaggagtgggaggctgcagcgagctatgaccacgccactgcactccagcctgggcaacagagtgaaactgtgtcgaaaaaacgaaagtgaaatggccaagaaagagattaccctgggcccctgcaggtcgaacctttgggtgccctccctgatctctctcctaactgtgctccccgccctgcccgactgcatccttcgccacagggccgtggtagcctgcatggctgtgtgctcgtgccgcaatgggctgagcacgtagatctgatgtgacaccagtgcctggagatgaacagcacctgacccttgctcccagggaggtcaaggtgcagcgaggctgtgcaataaagtcgggagtgtggtgagctgtaaaggaagcccgcaggcctaggccacgggcccgagggcaggggcacgccatgcagaaggactctgacccggccccacagctggccagataagagagacgccttgagtcgaggggccgggggctctgaggctcccccctggtatggcatgtcagcgtagttggggtatagggtacaaaatgtggcaagaggtgaggccagagagggtctggaccctgtagatggggcgggatgagaatgggtgagtctggatgggcagccacccacggcgatctcagcctgggctaagtgaccagtgggcagccccaaagcccgttaaacagaaggccaggtgtggcggctcatgcctgtaatcccagcactttaggaggccaaggcaggcagatcacttgaggtcaggcttttgagaccagcttggccaacgtggtgaaacctcatctctactaaaaataccaaaattacctaggtgtggtggcaggcgcctgtaatcccagctactcgggaggcttaggcgggagaattgcttgaacccgggaggcggaggttgcagtgagctgagatcacaccactgcactccagcctgggcaacagagtgagactccgtctcaaaaataaataaataaataaaaataaacaggcagaaggcagaactgtggccgattggatttcagggtgcaagagaagtcatcatcccacagacgccccccaagctggggctcatgtccctggcacagagagagggcccacacccataagaggaggctctagaagatcccacaagaggggcccagagggcagtggcatgcatgccacggagagggtgctgtctcctggccagtgagttctggttctttcttaaatcagagcgctcccgtgcatatgccttagcaaaatctctgctgtgtttaacaagcctcagtgcatcctggaagtactttttttttttaaatcgacttgtgcctcaatatactttttttttttttaaggaaactattgcttgggaataattttcagtttacagaaaaattgcatagatagaaaagagaatattcatggtacccacacccagtttccccgcacattaataactgatgactaaactcccaggctttatccaaatttcacctatttttctgctccagaatccagctcaggctcccacattgcacttggtggatttaacttttgagatacttccctgtcattttttatttttctttaaaagaaatgaaggccggctctgtcacccaggctggagtgcagtggcatgatcatggctcactgcagcctcaaggtcccaggctcaagcgatccttctgcctcagcctcccgagtgctcaggactacaggcatacactaccatgcctggctaattttttttttttttttgacagatgaagtctcaccatgttggccaggctggcctcaaactcttgaccttaagtgatcctcccgcctcagccctgcaaagtgctggaattacaggcatgagccactgtacccaaatacacagctcccaaaattaacacaggccaggcatggtgttgcctgtaatcgcagcactttgggaggctgaggtgggaggacagctaaagcctggagttcgagatcagccttggtaacatagggagaccctatctctataaaaatatctaaaaaattagctgggcatggtggtatgcgcctatagtcccagccacttgggaagctgaggccagaggactgcttgagcccaggaattcgtaactgcggtaagctaagtctgtgccactgtactccagcctgggtgacagagcgagaccctctcttcaaataaataagtaaataaaatagaacaataatgcccacatccatagacaataaataaatataccaaccatcctcaacctaaatgttatacttcataacaaaaatgaactccagcactttgggaggccaaggcaaaagcatcacttgagtccaggagttcgagaccagcctttgcaacatagccagatcccatctctaaattagccaggtgtgatagcacacacctatggtcccagctattcgggaggctgaggtgggaggatcactcgagacaaggaggttgaggctgcagtgagccgtgatcgtgcctgtgtactatagccagggcgacagagtgagaccctgtttcaaaacataaaaagataaaataacagtagtacctacttttgagtcattgtgaggactgcaggacttaagaaatattaagtgaggccgggcacggtggctcacccctgtaatcctggcactttgagaggccgaggtgggcggatcacttgaggtcaggcattcgaaaccagcctggccaacatggtaaaaccccgtctctactaaaaatataaaaattagctgggcatggatgtgggcggccataatcccagctactcaggaggttgaggcaggggaatcgcttgggaggcggaggttgcagtgagtcaagatcgtgccactgcactccagcctggacgacagagtgagactccatctcaaaaaaaaaaaaaaaaaaaaaaaggccgggctcagtggctcacgcctttaatcccagcactttgggagtccaaggcgggtggatcacctgaggtcgggagtttgagaccagcctgaccaacatggcgaaaccccgtctctactaaaaatacaaaattagcgggcgtggcggcgcatgcctgtaatcccagctactcgggaggctgaggcagaagaatcgcttgaacccaggaggcggaggttgcggtgagccgagattgcgccattgtgctccagcctgggcaacaagagcgaaactccagctcaaacaaaagaaatactaagtcctcaggacacagcctggaatgcaagaagcactcaataaatagtacctgttgctacgaattaccacatttttttaaatggtattttgggggtttgacgtgtagtttggggtaggaggcttttcgttttgttttttgtttttggatagtaccaggtttgggaagaatattctgagtcatacttaccttctaagctgcaagatgtcttttttaatttttctttgtcccctgaggtgcgggatgaaggggtttttttcttcctcctacctttttattctttttaatactgtcttgcttgtgtaacatcaaaatgaggcaagaaagagaaatcaatgaagtcatcttctcatcgatttagtctattcccaggtggccgaaaaggcaggaactgtgaactgaaaacttcatctggcatcagattttctttaattgtctctcgaacactcaccagtaagccagtgcttgctagaactctctagagccaggttgcactctcagcctaaaagaaaagtcttggctgaaacaaagaacagaaggatgggtggggacagaaaacctccctaaatgtgagaaaaggagtcattatttctgagaccaggccttgaaaccgaggtgcttgtctggttcacttgtttctttctttttgtttttgttttgttcagagacagggtctcactacgtcgcccaggctggaatacagtggtgccatcatagctcactgcagtctcgacctgctgggctcaagggatcctcctgcctcagcctcccaaagtactcagattacagacttgagccaccactcccagccctgtttgtttcttgaatagtcctttgcagaaaactggagacttatggactagggcccagctgccttcaaaagatgtttggggtccctttacaagtgagaggctatataggaatctgcaatttaagacaggcaattcttgcttacaaattggcatttctggaagtcagtgtgcctctagattatttataaaggacagtttgaaaccaattaagacagtcacttaatatgtcatatcaggtccgggtacactggcccatgcctataatcccagcactttgggaagtcgaagcgggaggatcacttaaggctaggtattcaagaccagcctgggcgacataatgagacccccgttgctacagaaaaattttaaattagctgggcatggtatcacacacctgtaatcctagctactcaggaggctgaggctggaggatcccttgagcccaggaattggaggcttcagtgagctgtgatcatgccactgtactctagcctagatgatggagcgagaatgtgtctctctttaaaaaaaaaaaagaaggcaggccgggcacggtggctcacacctgtaatcccagcactttgggaggccaaggcgggtggatcacctgaggtcaggagtttgagaccagcctggccaacatagtgaaaccccgtctctactaaaaatacaaaaattagctgggtgtggttggacacacctgtagtcccagctactcgggaggctgaggcaggagaatcacttgaacccaggaggcggggttgcagtgagccaagattgcaccactgcagggaggcggaggttgcagtgagccaagatcatgccactgcattccagcctgggtgacagagcaagactccgtctccaaaaaaaaaaaaaaaaaaaaaaaaagtgtatcaggttttcttggacatcactttgaacaggctagtaactactcagccgttttcatgtaatttttggtgagtcctgttcctgtaagacctaataaggagtgtgcttggctgtcagaggacaaagcctgtggcttacaggatttatgagagactgagtcacaaaggaagcacagcggcactggaaaaagtctggggtcttaggctgggtgcggtggctcaggcctgtaatcccaacactttggaaggccgaggcaggcgaatcacttgaggccaggagtttgagaccagcttggccaacgtggagaaaccctatctctactaaaaatacaaaaatagccaggcatggtggcaggcacctgtaattccagctactcgaggggctgaggcaggagaatcacttgaacctaggaggcggaggttgcagtgaactgacatcacaccactgcactccaacctgggcgacagagtgagatctgtctcattaaaaaaaaaaaaaaaaagaaaaaaaaagtatggagtcttttgtcccagtaaagtaatgcaggtgggatcctgacacctgttacgaaagctttgtcatctaacttgctcagagattgctcttgttttagtgttttttaaaaaaacaaaaaatttatagagacagggtctatgttgcccaggctggtctcgaacacctagcctcaagcgatcctcccacctcagcctcccgaagtgctgggattacaggcatgagccactgtgcctggccagggactactcttgaattcatgaaaccaagacaaaaccaacttttaaaaatcaccctgaggataggccactgtctgtgtttgttgctgagaatagggtatattttttccccctcaggtcagaactgttttgattttcaccgttcacctctttccatccatcctccaggtccccttgcagaaagagctctgcggcatacagtggccacagcgggccaggtgctcactaatcgatcgcacctctcagcagtgggcaggaggcgctaattagactctgagtagcttttgcagctgcacagaaagtgctggacagcacaagctgaaccccaagcaccatggccgtctgctgtaggaaaaaccgtagcaggagataaatatgtatccctgtctctctcggagccaagagcagagcgactaattcccaccatatgttgagctgcaaatcagatgttttgctctcctcccacagaaagaagcctgtccatcacaggtgtgagtttgttggttgagcaggtttattgagacgtaattcacagaccatacaatgcacccatttaagagtacaacccaggggcttttagtatattcagagtcaccgaaatggatcttagaaccccaaaaagaaacaccataggccaggcgcagtggctcacgcctgtaatcccagcactttgggaggccaaggcgggcggatcacctgcggtcaagagtttgagaccagcttagccaatgtggcaaaaccccatctctactaaaaatacaaaaattagctgggcgtggtggcaggcacctgtaatcccagctactcgggaggctgaggcagaatgacttgaacctgggaggtggaggttgcagtgagccgagatcaccctcactgttttccagcctgagtgacagagcgagactccatctcaaaaaaaaaaaggcgtcagaagatctgaggctctcccatccctggcaagcagacttctggcctctgggcagctggtgttttagggtacccaggatttgtcttaacccagtatggtgagactcacagacccagaaatgaccgtcaggaaggaagaagtttatattcacagtcctctggaagcaggaggcagggcacaccacacaggggccacatggggaagcaccagggtcagttgagggacagaggggaaaatatggacaggagtcttcattgtggtttcccggggaacaaatgggccaggcagggtgagcaggttcaggatggggccccgaggtgatgagggcagcgggaccgtggccaggagtgtgagagccccataaaggaggcaactgggggtctgagctctgcactgggtgcagaccctttactgtctctagaaactggcctgggaggggctgtgcatccatggtcagcaaagccccaagatgtcagagcatcacaaatccggaataaaaggacataatcaatacagcgggtctgtggcagggccactgactcatgtcttgacccatcagctatttcagtggccgcatgtgttccaggaagactcaatttatgactgtccacctcttattctatttcatttcattctttttcagagtcttgctctgtcacccaggctggagtgcagtggggcagtcatagctcaccacagccctgaaccccagggctcaagcaattttcccacctcagcctcccaggtagctggaactactggcacacaccaacatgcctgcctaattttttgttgttgttttttaagagacgagatctcactgtgttgcccagactggtctctaacctgctgtccctggtcatgaccccaacatgtgaaaacttcagtgtcttctaaatcatcaaaggagggtttacatatattcccatagatttagcattaccaatagtttattaaaattctttggaatcagcatttcttctttttttttttttttttttgccatcaacttgattttgggaattggcattgcttacatgctgttttttttgtttggttttttggttttagtttttttcaagacaggatctcactctgctgcccaggctggagtgcagtggcatgatctcggcttaccacaacctctgcctcccaggctccagcaattctcctgcctcagccttctgagtagctgtgattacaggtgtgcaccaccactgccaagctaatttttgtatttttagtagagacaggttttccccatgttggccaggctggtcttgaactcctgacctcaaatgatccaccccgctcggcctcccaaagtgctgggattacaggtgtgagccacaacacccagccagatgctatttttagtgactttttcttctatggactattgtattagagcagaattaatctgatttcagtcaagacctcagtccacaagcaaccatctgtcagccctgccaggatgctgctgggcaaaggatacatctcgggatttgcgccatatttgtacgtttaggtcataattgcctgggtggagttgagtgttgtacagaaatggcaagaaatgcctgtcctggaccgtgtcgcctttggtttaggattcctgtttttttacataggtgttgctttgtgagtgacatcttcaattgctttgtctcctataacaatagtaattgttagtcatgtgttatgacgtcagaatgtttctggcctctgaacaaatgtcatctttgctgtgctgggctgtggaaagaatgaacagctactgagtatatgtgcaatgtgctgttacacagcttagtggctgatgtcttaattggcaagaattcttgactcctctgccagaaaatctctaacacacactcacctgctcgttaacaatcaccttcaatttacagctaaattaaaagttgctcagaggccggctacggtggctcaagcctgtaatcccagcacttagggaggccgaggtgggtggatcacctgaagttgggagttcgagaccagcctgaccaacatggagaaactccgtctctactaaaaatacaaaattagccgggtgtggtggcacatgcctgtaatcccagctactcgggaggcaggagaatcgcttgaacctgggaggcagaggttgcggtgagctgagatcacgccattgcactccagcctgggcaacaaaagcggaaatccgtctcaaaaaaaaaaaaaaaaagttgctcagagaatgctgaatcctctcccaggagagctgctgcgagtacgttttccctagggtaagctctgcccaccccatggtttataactccgtgttcccaagaaagagacttctagctgctctcttcctgtaacatagacaaggcaatggtgtatcgggacctaggagccaggaggccacaggacagatcagatttcttttttttttctttttttttgtgagatggagtctcactttgttgttcaggctggagtgcggtggcatgatgtcagctcacggcaacctctgcctcccgggttcaagcgattctcctgcctcagcctcccgagtagctgggattacaggtgcccgccaccatgcccagctaattttgtatttttagtagagatggggtttcatcatgttggccaggctggtctcaaaatcctgacctcaggtgatccacccgcgtcggccttccaaagtgctgggattacaggcatgagccactgcacctgatctgacaaatcagatttctatttctcttctctaagctcctctcctctcctctctcctcccctcccctcccctcccctcccttcccttcccctctcctcttctctcctctcttctctcttctcttctcccctcccctcccctcccttcccctctcctcccttctcctcccctcttcttttcgagaaggtcccgctctgtcacccaggctggagtgcagtggcacaatcatagctcactgcagccttgaactcctgggctcaagcaatcctactgcctcagcctcccgagtagctgagactacaggcgtgcgccacttgtgctcagctatttttttattttgtgtagagacggggtcttgctatgtttcccaggctggttttgaactcctggcctcaagcgatccttccacctctacctcccaaactgctaggattacaggcgtgagccaccatgtctggcccagatttcttttttttttttttatttttgagacagagtttcactcttgttgcccaggctggagtgcagtggcacggtctcggctcaccacaacctccacctccggggttcaaacgattctcctgcctcagcctccctagtagctggttttacaggcatgtgccaccatgcctggctaattttgtatttttagtagagatggggtttctccatgttggctaggctagtcttgaactccccatctcaggtgatccacccaccttggcctcccaaagtgctgggattacaggcatgagccaccgtgtccggccgccagatttctttttaatgctgctctttgtccttacctgggcaaagctttaagatacaattttataaaatgtaagagtaaactagccaagtagcccatctcaactatgcttgtcaaataggaggggaaaactgaacctaatgaatgatggttgagctttatttattatttgtttattttttaggcggagtctcactctgtcgcccaggctggagtgcagtggcgcaatctccgctcactgcaacctccgactcccgggttcaagcgattccgtgcctcagcctcccgagtagctgagattacaggcatccaccaccacgcccttctaatttttgtattttgtattttttattttttttaagtagagacgggggtttcctggccaggctggtcttgaactcctgaccttgtgatcaacccacctcggcctcccaaagtgctgagattacaggcgtgagccaccgcacccggccatagttgagctttattaagtgttgcatcttgggaggcccaaagcaggaggaccgcttgaagtcaggagttcaagaccagcctgagcaacatagtgagacccccccccaacctctacaagaaaatatttttaaattatacagcacacctgtagtcccagctactcaggagactgaggcagaaggattgcttgaacctaggagtttaaggctgcagtgagctatggtcggccactgcactccagcctgagctagagtgagactgtctctaaaaataataataattaatttaaaaagttgcatctttccatgagtaggtgagcttgtcagcgggcacacgtatcctatgatctgaacccttaaattaatgaacagatgggtgtagacagcggtttgcagcccctgttgatgttgggttggtttataatcaccatatggaacagaatcggagcctcgcgtccacttcgatgctagaattctgttcgagtgctgatgaccaggggcggctaaacaccatgccctgccatctctgggtcttagagtcaccctaacatctgatctagattaattatcatcatgtgcgaggttttggcatgaagcacgccaggctcaccgtttcatgatcttagactatttacagcaaactcaaacagctcacttgctttttacaccctgcaaagaccaagggagagcctggaggggttgttttttttttctgttttattctatcaaagcagcaaatactgcaatttccacagtaaatggtcacagtggggaccaatatcctgccctccagacccgctgcttcagccaatacagcaagggaagacgcagctctgttttctagaaggatcccaccgaggcataaaaacggcgcagcccagcctggcgccgcgccgggtcccggagccccgggcgcgaacatggggaatgcgcactccaaaagcggggacaggcacagcgcgctccccggccgccccgagctgtctttttacggctctttccccaggaaatggagcgagaacgtcttcttggataacgagctgctgacctccaagatcctgtctgtgctgcggccgcagtcggagcggggcttccgcgccggggacctccgctacccgacccactttctcagcaccaactctgtccttgcctctgtcacagcctcgctcaaggagcacccccggggcaccctcctgtccgatggcagcccggccctgtccaggaatgtcggtatgacggtctctcagaaagggggtccccagccaacaccgagcccggctggccctgggacgcaactcgggtaagccagggtcccctctgtgccctcgggtgggtggtggcattccccggggagctgttgacagcctcttcggagggagaccccgacttagatctgtgtgaatccacacggcagcccccgtgctaagcagagaaattcccattaacgcttgcttccaggatccacgccttttttgcaaaaacgatgtgtcccggggtgtattcggcccctggtggagccagtttgcttagtgccctcgagggatccttggactcgctccttaggccgggctcctgacttactcaaggcgatgctcaaagtcctgctgggtgtgtggaggcggcgtcccattatctgtgccttacctcgttttataggacttcaaagtggttcccttgataatgcctgcagcggtgtccgggtagaaagtgatgctagaagctgatatgtttgtggtgactattccatgagttcgtgggaaagggagtaaattatcattttcctctgagtaaggactgccctcccaccttgaccatgaaaccatttccacttaactcctggtagacaggatcccaggggccccaagtgggctccagtggtctgtcaaggaagctgcaatccacaccccgttagaacgtaactaaacattaaaggaagttactatggaagaaatcctgatgtgacattgacagataatcttccccaccccccgccccccaccacttttttttttttttctttagacagagtctctgtcgcccaggctggagttcagtggcacaatctcagctcactgcaacctccacctcccagattcaagtgattcccctacctcagcctcccaagtagctgggattacaggcacctgccaccacacccggctaatttttgtatttttagcagagacgggattttgccatgttgggcgagctggtctcgaactcctgacctcaggtgatcctcctggctttggcctcccaaagtctgggattacaggcgtgagacactgcacctggcaaatctcccaatttttaaaaatgatctgtagacaaagttgaggcttctgtgaaaatgtggagagttctcagagagtatcgaatcggatggagtcaccgatgtgcctttgttgcatgaggtcgtgtgtgtttaattcacttttctaaaacaattgtttttattgtttgcactcagaccaatcacaggagagatggatgaagccgattctgcgtttttaaaatttaagcagacagctgatgactctctgtcccttacatctccaaacaccgagtccatttttgtagaaggtatggtcatctccgctctctcgcggctgccacacagttcctgtctctcctgggaagagctggggctcgtgtcagcatgtctacgggagggaattggggtggcatggctctgggcccccagcagccacacctcgctcttccctcagatccctacaccgcctcgctgaggagtgagattgagtcagacggccacgagtttgaagctgagtcctggagcctcgccgtggatgcagcctacgccaagaagcaaaagagggaggtggtgaaaagacaagatgtcctttatggtgaggagtccacagccctgtgccatcacaccggccctccactctcttctctgctccctcccttcctccctcccttccttccttccttccttccttccttccttccttccttccttccttatctttttctttctttctttctctctttccttctctcttttgtcctctttctctctttctttctttcttttttttcttttttgagacacagtctctctctattgcccaggctggagtacagtgggacaatcagagctcactgcagcctcgacctgggctcaaacaatcctcccacctcagcctccctagtagctgggaccacaggcatgggccactacacctggcgaatttttttattttctgtagagttgggggtctcaccatgttgcccaggctggtctcaatctcctgagctcaagtgacccgcccgcctgggcctcccaaactattgggattataggcgtgagccacggtgcctggcctctctctgtctttctctctcctctcttggtgcagccctgcctcccatgccaggaaagagactgtcggagaggattttgttataatacgtccctgtgaacatgtctggctgaatgcccaggtctggcttcttcttcccttgttggtggctgtcttagcctatataggcagctctcatagaacaccatacacagggtggcttagaagccacagaagtttattgcttacagttctagaggctgggacgtctaagaccaaggcggcggcagacttagtgtccatgaaggccccatttcctggcttcctgctggtggcatctggctgtgtcctcacaaggtcttcatggtctttctcaggtcctcttttttctttttttgagacagggtcttactctgtcacccaggctggatgcagtgatgcagtctcagctccctgcaacctccacctcccaggttcaagcaattgtcctgcctcagcctcccgagtagctgagatgacagtgcctgccaccatgcccagctaatttttttttttttttttttttttttgagatggagtctcgctctgtcgcccaggctggagtgcagtggttccatctcggctcacctccacctcccgggttcaagcaattctcctgcctcagccttccaaatagctggaattacaggcgcccactgccacgcccagctaatttttgtatttttagtagaggcggtgtttcaccatgttggtcaggctagtctcggactcctgacctcatgatcctcccaccttggcctcccaaaatgctaggattacaggcgtcagccaccatgcccggccatgcccggctcatttttttattttttggtagagacagggtttcgctgtgttggctaggctagtctcgaactcctgacctcatgtgatctgctcacctcggcctcccagagtgctgggattacagacgtgagccaccacccttggccctcaggtccttttcctaagggcaccagtcccaccatgaggttctctccccttaggacctcatcaccttccaagggctgtacctcctgatactatcacctttggggttcgaatttcgacatacgaattttgggggacgcaaacatcttgttcattgcagtctaggtctggtcagggacacacacagatgtgatggatgagttttaacagccacaggagtgttcctcagaacactcttcttcctaaaacagacttgatagccaggcgtggtggtgtgcacctgtaatcccagctacttgggaggctgaggcaggagaatcgcttgaacccgggaggcggaggttgcagtgagctgagattttgccactgcactccagcctgggcgacagagcaagactccatctcaaagaaaaaaaaaaaaacacggacttaaaatgtcgtccgttgggttgacactgggcgcaaaaccctcccgtgatggggaggcccagggttctctccttcccctgctccttcaggctgggatcccccgcagcattctaaaccctggacaccctggaagtaagaaagatcccaaaggcacaaggtcttaggcagagaactctcagaagccagttcagcacgtgaagggcaggcagcacccacgactgcccagcggggccgtggagccagcatggctaagtcctgccgtctgtgtccctgcagagctgatgcagacagaggtgcaccacgtgcggacgctcaagatcatgctgaaggtgtactccagggccctgcaggaggagctgcagttcagcagcaaggccattggccgcctcttcccatgcgctgacgacctgctggagacgcacagccacttcctcgctcggctcaaggagcgccgccaggagtccctggaggagggcagtgaccggaattatgtcatccagaaaatcggcgacctcctggttcagcaggtgggtgcagccgtgttcatctcaacagtcttcaaagcctctgccttgtctctgttcctttcttctttttttctgagatagggtcttgccgtgtcgcccaggctggagtgcagtggtgcagtcacagctcaatgcagcctcaacctctcaggctcaggtgatcctcccacctcagcctcccaagtagctgggactacagctatgcgccaccatacccggctaaattttattttttgtagagatgaggtctcactctatggcccaggctggtcttgaactcctgagctcaagtgatcctcctgcctcagccttccacgtagctgggactccagggaacaccatgcctggctaactttttattttttgaagagatggggtcttgctttgttgcccaggctagtctcaaattcctggcttaagcaatccccctgcctcggcatcccaaagtgcagggatcacaggcatgagccattgtgccagccttttcctttcagtaataaaacgagagtggcccctgaggacacacagttctgggccccttacagcgatgcctgcagttcatattctagaaacacagagacctaaattaggcagtgtccctggctgaacactattcaatgttacattcttctgtgctcttgtttggttggttggtttttggtttttggttcaagtcacttatgctttcaaccgttcaaagcttacctgttgactgagtgcagtggcccacacctgtaatcccagcactttgggaggccaagcaggtgaattgcttgagtccaggagttccagaccagcctgggcaacatagcaagaccccgtatctacaaaacatgaaaataaattagccagctgtggtggtgtatagctgtagtcccagctactcaggaggctgaggtgggaggatcacttgagcttgagaggtcaaggctgcaatgagctatgatcatgccactgccctccagcctgggcagcagagtaagaccccaatttgggagtgggggaaagcatacctgtgaaccagcaccaaccgtggtagtggtattaaccccaaatgatcaccctaggccaagatttacccaggggagctgtgcccttcatgtgacctcaaactatttgctcgaagcatcctgggccaactaattagaagaacactccttttgctttttatgtttctttttttgagacaaagtctcactctgtcgcccaggctggagtgcagtggtgcaatgtcggctcactgcaacctgcacctcccaggttcaagcaattctcatgcctcagcctcccgagtagctgggattacaggtgcctgccaccacacccggctaattttttttgtatttttagtagagacagggtttcaccatgttggccaggctggtcttgaactcttgacctcaggtgatccgcctgcctcagtctcccaaactgctgggattacgtatgtgagccactgcgcctggcctgctttttgtttctaacgtcctttggctgaaatttactttttttctcggctctcaggaagttgtacagcatctgtgatgcagcaaagccccgaagcagaaggtttttttatttcacctttatgacaccttgcgattagacaccccaaactgaagcatttctctgtttgaggacatattagaaaatggaactgcagccaggcactgtggctcacacctgtgaccccaacactttgggaggctgagtgggggtggatcacttgaggttatgagttcaaggccagcctgaccaacatggtcaggttagccaggtgtggtggtggcacctgtaatcccagctactcaggaggctgtggcaggagaatcactcagacccggaaggcagaggttgcagtgagccaagatcacaccactgccctccagcctgagccacagagcaagatgctgtctctaaaaaaaataaaagaaaatggaattgcaaataaatctaatatttattttagcagagtcagacaaattagatgaaaatatactttggctggccaggcgcggtggctcatgcctataatcccagcactttgggaagatgaggtgggtggatcaagaggtcaagagttcgagaccagcctgaccaacatggtgaaacctggtctctactaaaaatacaaaaattagcagggcatggtggcatgcccctgtaatctcagctactcaggaggctgaggcaggagaatcgcttgaccccgggaggtggaggttgcagtgagccaagatcacgccactgcactccagcctgggcaacagagtgagactctgtctaaaaaaaattagccaggcgtggtggcggcacctgtaatcccagctacttgggagactacagcaggagcatcgcttgatcccgggagacagaggttgcagtgagccaagatcgcgccattgctctttagcctgagccacagagcaagatgctgtctcaaaaaaaaaaaaaaaagaagaagaaagaaagaaaatggaattgcaaataaatctaatatttattttagcagactcagacgaattagatgaaaatactctttggcagttttcgtgtttaattaacatttccatccttttgtttatcagttttcaggtgaaaatggggagagaatgaaagaaaagtacggtgtgttttgtagtggccacaatgaagctgttagtcattacaagttgctgcttcagcaaaacaagaaatttcaaaacttgatcaaggtaaaaacaatttttttttttaatcaaaaacttatattctggccgggcgcagtggctcacgcctgtaatcccagcactttgggagtctgaggcgggcggatcacaaggccaggagatcgagaccgtcctggccaacatggtgaaaccccgtctctattaaaatacaaaaaattagcctggcatggtggcacgcacctgtaatcccagctacttgggaggctgaggcagaggaattgcttgaacccaggaagcaaaggttgcagtgagccgagatcgtgccactgccactgcactcgagcctggcaacagagcaagactctgtctcaaaaaaaacaaaaacaaaataacaaaaagcaaaaaaaaaaacttacattcttcactgtggggtttttccacagaattgtagagtcttgagacttgggaattaaaaggcatctgttatgtagcagtgatttttcaaggtttggtttgggttttaactacaaccccattcagaacacgtcagtgaaatcttacatagaatcctgagatgtaaaataaagcgggccagatgcaatgcctcacgctgtaaatccagcacttcgagaggccaaggcaggaggatcacttgaggccaggagttcgagaccagcctgggcaacatagcaagatcctgtctctaagaaaaatttaaaaattagccaggcatggtggtgcacacctgtaatcccagctactccagccgctaaggagggaaaatcagttgagctcaggagtttaagagcagcctgggcaacatagcaagatcccatctctattatataagatacatatgtatacacacacacatattaacaaaatcaatcaaagaaagcatatctagactttgttccttaccaggccacggtggcccctgagagacccctgcagctcagtatgggacctgctgaccaccactttgtgtcatcactgtttggatgacacaaagggtcgtttgaaggggctgccctgccccaggaactgggcctccagatccagcctgtcttgccttggggatgccgtctgtctcaaggagggttactccagatgggcacggtggctcacacctgtaatccctgtaactttgggaggccaaggcgggcagatcacctgaggtcagaagttcagtaccagcctgcccaacatggcgaaaccccgtctttactaaaaatacaaaaaattagccaggcgtaggccgggcacagtggctcatgcctgtaatcccagcattttgggaggccaaggcgggtggatcacgaggtcaggagatcgagaccatcctggctaacatggtgaaacctggtctctactaaaagtacaaaaaattagccaggcgtggtggtgggcgcctgtagtcccagctactcgggaggctgaggcagaagaatggtgtgaacccgggaggcggagcgtgcagtgagctgagatcgcaccactgcactccagcctgggcaacaagagcgaaactccgtctcaaaaaaatacaaaaaaaaaaaaggagggttactccaaacttttgtccccttgctggtccatgttcgcccccggagcgtgtagaatgatcttcctgcctcctttgtgtgagcgtgggtaggtgctcgaagcccagccggagtcagccaagtcaagggagaccccacctcccacgtcctagaaaccacacttggatgatggctagttggttctatcaacattcacctctttagaggccctaacactgctgattccacaagagctgcatcacctgtggcctggccaggacttggttctgcagtggcattctacacccagtggtccaaagttaggagtgacatgcgtttaaacttcattgcattataggtaggtaggaaagggggaggatcgttttggagccgcagttcctcaaagccaggagggggattccaatgaaacctccgtccacggactcttgcaaatcccacagcggctccgggcctcttcagtggctctctgcaagtgctggcatccctcaaatgcatacaagagcagcgggagcaaacaagcagaaaatgtgctatgctcccgagagagtgtcaggtgaccccttttggttcttagccagaggtgagcatcagaaagcacccaggctgggcgtggtggctcacgcttggaatcccagcacttttggggaggccaaggcaggcggatcacttgagcccaggagtttgagaccagtctggggaatatggcgaaacctcatctctactaaaactacaaaaattagccaggtgtggtggcgcacacctgtaatcccagctactcggaggctgagacaggagaatcgcttaaacttgggaggcggaggttgcagtgagctgagatcacacccagggacccattcaaaaggcacaggcccactctagttctggagggttccagcagtcatgggttagggggtgtgtgttcatgtgtacattgtgtgtgtggacagcttgacagatgatttccataataaccccctggctggttctcatttattttatttttttagagtcagggtcttgctctgtggcccaggctggagtgcaatggaagaatcatggctcactgcagcctcaaactcctgggctcaagcaaaacctcctgtctctgcttcctgaatagctgggactacaggagtgtgccaccatgcccagctaatattttaattttttgtagagatggggtcttgctgtgttgcccaggctggtctcaaactcctggtctcaagcattccttccaccttggcctcccaaagtgctgagattacaggcatgaaccaccacatctgtcctttggtggcctttgtatatacagcaggtgatccctgcgttcaggtatctggtgtctgtctcctccaaagtggcaaaggaaaggtcctggtgagctgagaaaggaaggagcccccagccttggcagccgattgttgacaaattgggcagaaaccgagatgttaatgcaggatcttgctgtccatttccgagatgttaatacgcaatcttgctgtccatttccgagctgttaatgcggtatctcgctttctgtttctgagatgttaatacaggctcttgctgtccatttccgagatgttaatatgggatcttgctttctgtttccatttccaagacgttaatacaggatcttgctgtccatttccaagatgttaatgcgggatcttgctgtccgtttctgagatgttaatacgggatcttgctgtccgtttccaagatgttaatgcgggatcttgctttccgtttccgtttccgagatgttaatacaggatcttgctttccgtttccgtttccgagatgttaatacgggatcttgctgtccatttccgagatgttaatacaggatcttgctttctgtttccatttccgaggtgtgaatgtcgatcttgctttctgtttccaagacattaatatgggatcttgctttccatttccatttccaagatgttaatacgggatcttgctgtccatttccgagatgttaatgcgggatcttgctgtccgtttccgagatgttaatgcaagatcttgctttccgtttccgagatgttaatgcgggatcttgctgtccgtttccacggtgttaatgcgggatcttgctttccgtttccgagatgttaatacggggtcttgctgtccgtttccgagatgttaatgcggcgtcttgctgtccgtttccgagatgttaatgcggggtcttgctgtacctttctgagatgttaatgcaggatcttgctgtccgtttccgagatgttaatgcgggatcttgctgtccgtttccgagatgttaatgcaggatcttgctgtccatttccgagatgttaatatgggatcttgctgtccatttccgagatgttaatgcgggatcttgctgtccgtttctgagatgttaatacaggatcttgctgtccgtttctgagatgttaatacaggatcttgctttctgtttcctagaaaattggcaacttctccatcgtgcggcggcttggcgtgcaggagtgcattctcctggttacacaacgcataaccaaatacccagtgctggtggagcgcatcatccagaacacggaaggtaggccttctccccactgccccgcccgcccgtgctgctgcagcacagggctctctccgtgtacccactccctatttgagcagcaaactgaataaattccctttgaaatccagtttgctgggtgctggggttccttccttttttttttttttttttttaagagacagagtctcactctgttgcccaggctggagtgtagtggtgaaatcatagctcattgcacagcctccaactctggggctcaagtggtccttctacctcagcctcccaagcacctgggactacaggcatacgccactacacacagttaattttttttaattttttttttagagatggggtctcgctgtgttacccaggctggtgtggaactcctgggttcaagtgatcctcccacctcggtctctccaaagtgctgggattacaggcatgagccatcacatctggcctgggtttttttgttttgttttgttttgagacagtcttgctgtgtccctcaggctggagtacagtggcacgatctcggctcactgcaacctccacttcccaggttcaagtgattctcctgcctcagactcccgagtagctaggactacaggcgcccaccaccacacctagctaactttgatatttgtagtagagatggggattcaccatgttgatcaggctggtcttaaactcctggcctcaaatgatccacccatgttggcctcccaaagtgctgggattacaggcatgagccaccatgccacgcccagcctggcctggggcttttgatacaagaaagatggggtggtcagcaccatgaaagcaggagccaggtctcatttgccaactgtttcccccagcccctagcacaggctgggccactgcaggccctcagtgttagtgtctgtggaaaggatgaatggatggagacggtgccctggtggttcaaacagacccagagatggcctctgtgtcacatgaccagggctgagcaagggatgtgtctggagccagggaggcagagaagggcgggcagtccagccaggagttctggcagccagggccgtgctgaccacagctctcgcttcaccactgaattcaggccgtgagaggatgaacaaatttccccactataaaagccacatccttggagtgggaagagccagatcccagtcacaacaggaggtggagggaatctaatttatttatttatttatttatttattgtaagatggagtttcactcttattgcccaggctagagtacagtggcatgatcttggctcactgcaacctctgcctcctgggttcaagtgattctcctgcctcagcctcccgagtagctgggattacaggcatgtgccaccacgcctggctaatttttatatttttagtagagacgaggtttcttcatgttggtcaggctggtcttgaactcccgacctcaggtgatctgcccgcctcagcctcccagagtgctgggattacaggcgtgagccaccatgcccagctgggagtcttttatgaagggattgggacagaggaaagttcgtttaccaagcagtagatggcagagctagtcatggcagttttgccacttgaattgcaccttagcttctgcattcgatagatgctctacctaggtaaaaattcagctctgggccaggcacagtggcttatgcctgtaatcccagcactttgggaggctgaggcaggcggatcacttgaagtcaggagtttgagaccagcctggccaacatagtgaaaccccgtctctactaaaaataccaaaaaaaatagctgggcatggtggcgggtgcctgtaatcccagctacttgggagactgaggcaggagaatcgcttgaacctgggagacaggttgcagtgagctgagattgcgccattgtactctagcctgggtgacagagccagactccgtccaccctaccctcccccccccaaaaaaaacctaaactctgacgtgttgcatttattttggagaactatttgcatctcaggagattacatttgggaagtgatcttgagggtcttctgagtggtggccttggagaacacacctcatagatcccacacgcccatacatagtgtgtccacacacctcatagatccacatgtccatacatagtgagtgtgtccacttctgttgtgttaaagtggaaaagaaagacgctaactctgctatgtgtggcagctggcactgaggactatgaagacctgacccaggccttgaacctcatcaaagatatcatctcacaagtggacgccaaggtcagtgagtgtgagaagggccagcgcctcagggagatcgcagggaagatggacctgaagtcttccagcaaactcaagaacgggctcaccttccgcaaggaagacatgcttcagcggcagctccacctggagggcatgctatgctggaagaccacatcagggcgcttgaaaggtaaaggcctgcccctgcccacctctagtgggtgccatcttggatcagtgggcactgtcttggagtggtgggcactgtcttagattagtggcaccatcttgtatcagtgggtaccatcttggagaggtggtcaccatcttggattggtgggtactctcttgattggtggcactatcctgtatcagtgggtaccattttggagtgttggttcccattttttattggtgggtgccatgttggattggtggcattatattggattggtgggtgctatcttgggttggtagcaccatcttgggagttgtgggtgccctcttagagtgatgggtgccatcttggatcagtgggcatcatcttggattggtaggtgccatatgggattagcagcaccatcttggagtggtggcaccatattggattggtgggtgccatcttgggagttgtgggcaccctcttggagtggtgggtgccatcttggatcagtggcaccatcttggtgggttccctcttgaatcagtgggcacaatttgggttggtgggtgccatcttggattggtggcacagtcttaggaatgatggcaccatcttagatcactgggtgcctcttggatcagtggcatagtcttggaaatagtgacatcctggatcagtgagtaccatcttggatcagtgagcaccatcttggaatggtggcatcatcttgatcagtgggctccctcttggatcagtggccaccattttgattggtgggtgccatctcggactggtggcatggtcttgggagtggtggcatcctctcagatcagtgggtgccctcttggatcagtgggcaccatcttggtttggtttggtgggtgtcaactgacacagagccactgaagtctggctacttcatggctgaagggaggttatgagctgagtcaggatgagcaaggcagctggggtgtagcataaaagagatggttgtatcaccgtcctcctcctctggtctttggaagggtgcagtacacaccaggagggcatgctgagttgttgacttcccaatggaaacccagggcattggtggcacatcgagacaccccaggtttgggcccagaattccaaacacgctcagctgcccatctgggcagtcatgggccagcctgcctgccatgggcccagccactgagaggcccccatgtggatagagaatacccccaggactgctgatcagcatccccaagcatcccactcgctgcccagggtgtgctccgagccctactttcaagacccatgttgcagttcagaccagagagtgctcaggattcattcctgggtttcctgttcatttttggagcctctagaaacatcccaagctatctattcacatcagcatctttaaggatcttgagggagtcattgaggtggccaaatgacagcacttgcccactcatcatttgagtaggcgtgtatttcgcagacaggtttagcgccttctgcctgccaggcgccgagttggatggtaggaatacaccccaccgggcaagacctggtgcctagccttttaaggcatcagtcactgggctgaaagagagaaacaagccaaaaaacggaaaaactagttagaagtccagcacatgctttaaggaagccagcaggctgcagtgtgagagaattagcaaaagcgtatctgacttagacaggggtgttggaagcagctccccaaaagtggcgttgcccttgaaacgcagctcaggatttgcatctatgtgcaggaagccttacagcacgagaggttcatacagggacaaggcgccaagggggactgaggggcacgaggggactgagaccacccctggcctgcatcgctgctgtggctcgggtcctggtgacccaggagcagggagaacagagagctccgttcacatctgagacatcagagggagagatgttgtattagtccgtgttcatgctgctgataaagacatacctgagactgggcaacttaccaaagaaagaggtttaatggacttaaacagttccacctgtgggggaaggcctcacaatcatggcagaaggcaggaggagcaagtcaagtcttacatggatggcagcaggcaaagagagagggagcttgtgcagggaaactcccccttataaaactgtcagatcttgtgagactcattcactatcacgagaacggcatggaaaagatctgcccccatgattcaattacctcccaccaggtccctcttacagcacgtgggaattcaagatgagatgtgggtggggacgcagccaaaccgtatcagattctcaaaggtcagacccagcaggtgttgttacagcaaagagaattgccgggcacagtggcctgacatgggcgggagccctggtttgagctctggacacggaagggacttagaggaggctccggctgctcgttggtgctgaaggttgagacctggaaaggtgatggggggtgcaggcaaggcagaaaggaaacttctaggcccaggcagaagcatcatgctgcttacaccttcctgggaagtggcatccgcgggggtggccagcaagacctcctggctatgggacttttaagatgcatccttccatgctgttttcccagatatcctggctatcctgctgaccgacgtacttttgctgctacaagaaaaagatcagaaatacgtctttgcttctgtggtatgtatcctgtctcttcagacgaagggtcggctgggtgctgtggctcacgtctataatcccagcactttgggaggccgaggtgggcagatcacttgaggtcaagagttgaagtccagcctggccaacatggtgaaacctcacctctactaaaaatacaaaaattagccgggcatggtggcccatgtctgtagtcccagctactcaggaggctgaggcaggataatcacctgaacccaggaggtgaaggttgcagtgagctgagattgtgccactgctctccagcaagactgcgccactgctctcccgcctgggcaacagagcgagactctatctcaaaacaaaaaaacaaaacaaacaaacaaaaaacagacgaagggccctgcttgctgtgaccttgttgggaggttggctgaaactgcccatggaaggggcacctgtgagttttccaggcccacatagctgggattacaggcgcccgccaccacgcctggctaattttttgtatttttagtagagacggggtttcaccatgttggccaggctggtctccatcttctaacctcaagtgatcctcccgccttggcctcccaaagtgatgggattacagtcgtgcgccaccgtgcccagctgctggtgtgttcttaaccagtgtatttgtttgctgaggctgctgtaaacaaagtaccatggactgggtggtttagaccacataaatttattgtctcatgtttctgcaggctgaaagtccaagatgaaggtatcagcagggttggtttcttctgaggccccttggcttgtaggcagccatgtgctcatctgttctctgtgtcctcgagtggccatccctctgtgtgtgcctctgtgctaatctcctcttgttagaaggatgccagtcagattggatttgggcccgcccatatgatctcattttgccataatcacctctctttttttttttttttttttttttttttgagacagtctcactctgtcgcccaggctggagtgtgcaatgacacaatctcgactcactgcaacctccacctcccgagttcaagtgattctcctgcctcagcctcctgagtagctgggattacaggcacctgccgccacacccggctactttttgtatttttagtagagatggggtttcaccatgttggccaggctggtcttgaactcctgaccttaagtgatctgcctgcctcagcctcccaaagtgctgggattacaggagtgagccaccacacccgcacattaatcacctctttaaaggccccatctccaaagacagccacattctgaggtgctagggctcaggacttcatatgaatttgtggggaacacagtgtagcccactctagccagttaaaatgtgcattttgctggtctgtggaagcattgtctcttgaaggatgcgtgacagactagaaataccggtggctctgggtggcctgaggcacaagacagagatgggtttatctgttgttatatactacataccgttgtatcttttgagctttctcgtgtgtatgtgcattgccgactatttaaaaaaaaatttttaagctgatgaaattgacacattatcgggatactaaggggcaagatggctcactcctgtcatctcagcactttgggaggccgagataggaggatcacttgagcctaggacttcaagaccagcctgggcaacatagtgagatcccatctctacaaaaaatacaaaaattagctgggcctggcggcacgtgcctataatcccagctactcaggaggctgaggtgggaggatcacttgagcccaggaggtcaaggctgcagggaacaatgattgcaccactgcactacagcctgggtgacagagcaagacctggcctccaagatagtttaaaaaaaaaaaaaaaaaaaaaaaggtttctaggatttcactgcaatagtatcttttttcccccagatggcaaaatatttccgctttgaattgtttgaaaagaaatgaggagcgtgacccccactcttagttcccctcaccaggcccttgacctccctgctgtttgggtgctgtggggtaaagggtgacctccccaatgccctctactcatgcaggactcaaagccacccgtcatctcgttacaaaagctcatcgtgagggaagtggccaacgaggagaaagcgatgtttctgatcagcgcctccttgcaagggccggagatgtatgaaatctacacgagctccaaagaggacaggaacgcctggatggcccacatccaaagggctgtggagaggtgaggagggcctgggggtctccccacccactgtgttccttccgctgattggtccacccttggcttcgaccgttggccatcagctgtgaccttgaactccctcatcccagcttgggacccatgacgccattccagctccttctgatgactcaacctgttggacgttgaggccaacgggcccagaaaggcagctgtaacctgggcctttctgcatgcgtgggccactgcacctgccatggcgggctctctgcattctagggccagatttgttggagcagggcatggcatcttgtccttcctccttgggccgagcacccctcagggcccagaaccagctggcttcccctccctctctttattttttatttttttgagacagagtcttgctctgtcacccaggctggagtgcagtgatgcaatctcggctcactgcagcctccgcctcccaggttcaaacgattctgctgcctcagcctccccgagtagctgggattacaggcgtgagccactgcgcccagcctattttgttttgttttgttttgttttttagagtctggctcttgctctatcacccaggctggagtgcgctggcacaatcatagcttattgcaacccaaactcctgggctcaagccatcctaccccctcggcctcccaagtagcttgaactacaggcatacaccaccacacccagctagattttttatttttgtagagatggggcctcactgtgttgcccaggctggtcttgaactcctggcctcaagccatcctcctgtcttggcctcccaaagtgttgggattacaggcgtgagccaccatgcctgtccactccctctcttgattcccggaggcttcctggtgccttaatctggttcagactcccccatccacagtagctgtagctctacggggcttgcagccacccacctgcacctggcaggtcctctgcaagcccgctgtcccctggactcctcctctaagtcacaggcaggcatgtaaagcctcttcctggttatgccctggcgctttggggcgggatgaatgtcagtggctctctctcttcccctcctcgtcctcctgcaccacgaacaagctaaatcactcccaaagtcagagacggtcgtggcggctggttctgcagaaccagcgtctgtgccgaggctggcctgcctgggaagcacagttacccacccgactcctctccctgcagctgccctgacgaggaggaggggcccttcagcctgcccgaagaggaaaggaaggtggtcgaggcccgcgccacgagactccgggactttcaaggtgagcgggagacagcgtctgggcacaccccttgtgtggtgagccctgggccctccatcaggactggccacagagggtgaactgccccccaggtgacccggtgttttcccgtgggctgtgccatgtcctgcagctctgtgaagcattagaacgggctgtgccatgacatagcgatctccagaggtcacttagccctttgggggtatgtgggagagggagggaggagagcccagaggacctgagccccttccagagccgaccacacagccacacacgccaccaccaccccatcctcgtgcagccaggagctcaacagggcatcccagtcccatacgaaggaatagcacagggtccccacagcctccttccagagcttcctcctccctgtttaattacacgattgagatgtaattcacacaccacagcactcaccctcccaagcgtggggttcaggggcatttcagtgcatttccaattatgcagccagaatcatgttaactttagaacatcccaccaccccagaaagaagccccgtcccccttaacagtcactccccaccccatgccccaaccctggcaacaggaatctacttcctgtccctgtagattggcctgccctggacattccacataaatggagtcacaccgcgcggccttttgggtctggctcctctcgaggtgtggtattaaggttcgcccgcgctcagtgagcactttgtcaagaacaattcctggtgccctgtagcctgcggcaagctcccttcttccctttcactgtctgtatttttttttattttatcttcttttttttttttaaacagagcctcgctctgtcaccaggctggaatgcagtggcgtgatctcggcttactgcaagctctgcctatcaggtccaagagattctcctccctcagcctcccgagtagctgggactataggcacccgccaccacgccccactaatttttgtgtttttagtagagatggggtttcaccatgttggccaggatggtctcaatctctcgacctcgtgatctgcctgcctcggcctcccaaagtgctgggattacaggcgtgagccaccgctcccggccctgtattattcatttctaaattggataatactcaaacaataagtggcctggtatggtggctcatgcctgtaatccctgcactttgggaggctgaggcagatggatcactggaagccaggagtttgagaccagcctggacaacatggcaaaaccctgtctctacaaaaaatttaaaaattaggctgggtgcggtggctcacgcctgtaatcccagcactttgggaggccaaagcaggtggatcatttgagatcaggagtttgagaccagcctggccaagatggcaaaaccccgtttctactaaaaatacaaaaaattagccaggcatggtggtgcgtgcctatagtcccagctactcgggaggctgaggcaggagaatcgcttgaacccgggaggtggaggttgcagtgagccgagattgtgccactgcactccagcctgggcgacagagcgagactccttctcaaaagaagaaggaaggaaagaaagaaagggaggatggaaaattcagttttctaaggctctaagttggtcccagactaataaatgggcctgatacaatcctcactcacaccctactgtgtttgattttattttatttcttttagagacaggatcttgctttgttggccaggctggagtacagtactgcagtcatagctcactgcagccttgaactcctgggctcaagcgatcctcctgcctcatttcccaggcatgcaccaccacaaccagctaattttttatttgtagagacagagtctcattatgttgtccaggctggtctcgaactccaggccgcaagagtcctcctaccttggcttccctaagtactgggatcgcaggcctgagccaccacagctaacctgatttttataacaagggggaaaataatcagaggacaaggccatgccctcccctacctcccaggaatgcaggacacaagggggcagcctacctcagggcagggccagcggggttcctcatccttaggccagtccccggggctcagatgattccagggaaggccgacccggctgactgccacctccaccatcactctgcagagcggttgagcatgaaagaccagctgatcgcacagagcctcctagagaaacagcagatctacctggagatggccgagatgggcggcctcgaagacctgccccagccccgaggcctattccgtggaggggacccatccgagaccctgcagggggagctaattctcaagtcggccatgagcgagagtaagttggctgcccacacctcaagggtgcagtcttgccggggtgggctcctcagggaaccccaggccaggctcacggctcattgtggccgacacggcaccctgtccaggacaggcttctatgtggggggggcccaggagcagcactgaccgccccccggtgcctgtgagagccagaagggccttagacataatctgggccaagccgctccttgcagacataaagcactttctccccgttcaacaaccgctctgatgctccctgcatgcagaggctctaagccgggccgtggggaggatctgaagttgactaagactggttccctacctaccagaggttcctcttcttcctgggaggtgggtcctggtgatatccccagaaaaacacacgcacactccctcagtgggtccccacgcacagctctaacacagccgccaggcccctgggctggccgcttgagcaggcagtcagcgcccagtctgctctttctttttttcttttcttttttttttttttttttgagatggagtctcgctttgtcacccaggctggagtgcagtggcgtgatctcggctcactgcaacctccacctcctgggtttaagtaattctgcctcagcctcctgggtagctgggattacaggcacccaccaccacgcccagctaatttttgtatttttcgtagagatggggtttcaccatgttggccaggctggtctcgaactcctgacctcagatgatccaccctcctctgcctcccaaggtgctgggattataggcgtgagccaccgcgccctgcctcaatctgctctttcaacagtgagggaagccgactcagcccctgccttccagagcctttccgcagaataagacggcagagacgggggtcagtctttctccctccaggcccactgacatccttccacccggctccagtggccattgttcttggccccctggggacactctcatatcccgcaccttggcctggaatgttcttgtccccacctctgtgcctggccacagcctgttggtcctagagggctttctgtagacagcccttccccacaaagtcactctcccatatggccattgtcacacaatcagtgtatggtcattgtcatataacacaccaagtgtttcctgctggccctgggcagggccacatccagcattcgccagcccctggcccagggcggcctggtggaaggagctgcaggagcctgtacccgccctccccatggctgccccacagccctgtcctctcacttagacgcagattggcctgtcctggtggccatacctgaagtaagggtgtgcgcagggacagtggggctgaaatcccacggcacacagaagggggcaggcgatcaccaccccagtgagtccctccgtccacccgggtctcgctgccccagcgctccgtattcccccagcacacttccgcagggcgacccgtgcctcctgtccccttccttccacagtcgagggcatccagagcctgatctgcaggcagctgggcagcgccaacggccaggcggaagacggaggcagctccacaggcccgcccaggagggctgagaccttcgcgggctacgactgcacaaacagccccaccaagagtaagagcggggccgtctcccctcctgcctccagggccgcccctcaggatgcacattaacttgtatggggtttcctagaactttcttttttgttgttgttgagacagagtcttgctctgtcacccaggctggagtgcagtggcgcaatctcagctctctgcaacctctgcctcctgggttcaagtgattctcccgcctcagcctaccaagtagctgggactataagcacacgccaccatgcccggctactttttgtatttttagtagaaatggggtttcaccatgttggccaggctggtctcgaactcctgacttcaggtgatccgcccgcctcagcctcccaaagtgctgagattgcaggtgtgagccaccgcacccagccgattttctggaaccttctgaaaccctccagacatcgttggttgtgttgtgacagcagcacccagaccagcctgcccctctccagcaggcgtctgtgctgcagacgccaccattcgggcctagcctgggtttcctacctgggcaggggctgggggtggactgggaagcttccccctccccacgggatggcagcatcctcatgcccctggcttggggttctcagatggcagtttcaagaagaaagtcagcagcactgaccccaggccccgagactggcgaggccccccaaacagcccggacttgaagctcagtgacagtgacattcctgggagctctgaggaatcgccgcaggtggtacgtggatatccatttgctcggtacagtctgagtcgtcataaggattcatgtgtgtgagcagcttctgctggggttgtccagttttagtcttattagcatcgacaagcattgtttgttttgtggtgaataacagtatctcagcccagattaatgcactggcaggtgatttcttcctgcagcctcctgggaaaagcaaagaggtccccaagaggaaggctggggaggggacaggctcagggcactcaccatggcttcatcaacaggcgaggaaccccctacagggaccaccagctttcagccggggcaggtgtggtggtgcctaccagatgccagatgtccccggctattcctttgcctttgaatcagaaggccaggtgcctactcggccctgcccaggtcagggggtcagaggccaaggccagttgcctctgatcagttctgaggcttggacttgcccctgtggccagagctggcacgcaggcctcatagccaagcccactctacctcccaggaggccccagcccctcgttttccaaacacccagatttgtacaagtcagctgaccagcagggcctgtgttcccagtcatgacccggtcctgggtccttcctgttatccacactaagggatgtattttcaataataagcaggggccgggtgcagtgcctcacacccataatcccagtgttttgggagaccgaggtgggaggatcactttttttttttttttttggagacaaggtctcactctgtcacccaggcttgagggcagtggcgtgatcacagctcacacagcctctaactcctaggctcaagcaatcctcccacctcagcctcccaagtagctgaaactacaggtgcgcgcccccacacctgactaattttttaaatgtttggtagatacagggtctcactatgttgcccaggctggtttccaactcctgggctcaagcaatcctcctgcctgggcctcccaaagtgttgggattataggcaaggccgccatacctggccttgggaggatcacttgaggccatgagtttgagaccagcctgggcaacatagcaagaccacatgtcgacaaaatatttttaaaatagctgatcctttggctgggtgcggtggctcatgcctgtaatcccagcacttcaggaggccgactcgggtgatcacttgagtccagggtttgagaccagcctggccaacatggtgaaaccctgtctctactaaaaatataaaaattagctggacgtggtggtggatacctgtaatcccagctactcaggaggctaaggtgggagaatcgcttgaacctaggaggtggaggttgcagtgagccgagattgcaccactgcactctagcctgggcgaccaagcaagactttgtttcaaaaaagttaaaaatagctgctgggtgtggtggctcacgcctgtaatcccagcactttgggaagccaaggcaggtggatcacctgaggtcaggaattcgagaccagcctgaccaacatggtgaaaccccgcctctaccaaatatacaaaattagccaggcgtggtggcacattcgagtaatcccagctatttgggaggctgaggcaggagaatcacttgaaccaggaaggtggtggtttcagtgagctgagatcgtgccattgcactccagcctgggcaacgagcaaaactccatctcaaaaaaaaaaaaaaaaaaaattaaaaatagctgatcctggtggtgcacacctgtagtcccagctactcaggaggccgaggtgggaggatcaggccactacactctagagcaaggccctgtctcaaaaaaaaaaaaaagaagccaggcatggtggctcatgcctgtaatcccagcactttgggaggccgaggcgggcggatcacctgaggtcaggagtttgcaaccagcctggccaacatggtgaaactccgtttctactaaaaatacacaaaattagccaggcgtggaggcttgagcctataatcccaattactcgggaggttgaggcaggagaattgcttgaacccgggagctggagggtgcagtgagccaagatcgcgccactgcactccagcttgggcaacaagagcagaattccgtctcaaaaaaaaaaaaaaaaaaaaaagttaaaaaaaaagaagaagaagaagaaggcttgagtctagtcggatgggtcttgagccactctctctggtttgacggtgtcctcttcccaggtggaggcgccaggcacggaatccgatccccgtctgcccaccgtcctggagtcggaggtaggcgcccgcgggtctccatctccccagggccttgtgcacgcgcgtgtggcctcagcccgataactagcatcaatctccctctcctctccgcagcttgtccagcggatccagacactgtcccagctgctcctgaaccttcaggtacaggggcggggtggggccggccacgcgtgccctttcctggttggctggggcgcaggtgcggctctcactcgcctggccctggccctccgcaggcggtaatcgcccaccaggacagctatgtggagacgcagcgggctgccatccaggagcgggagaagcagttccggctgcagtcgacgcgtgggaacctgctgctggagcaggagcggcaacgcaacttcgagaagcagcgggaggagcgcgcggccctggagaagctgcagagccagctgcggcacgagcagcagcgctgggagcgcgagcgccagtggcagcaccaggagctggagcgtgcgggcgcgcggctgcaggagcgcgagggcgaggcgcggcagctacgcgagcggctggagcaggagcgggccgagctggagcgccagcgccaggcctaccagcacgacctggagcggctgcgcgaggcccagcgtgccgtggagcgcgagcgggagcgcctggagctgctgcgccgcctcaagaagcagaacaccgcgccaggcgcgctgccgcccgacacactggccgaggtgagcgcgcagcagccagtgtgcgcaggttgggggtgaccggtttgcacgtgcatttgcacgagtgcatgcaggtgacagggttcgcgggtgcatgcgtgcaggagtgtaagagcaaacggcacaagatacccttgcattaacagctcatgccgcagtacagacctttctcggagctggctaaatgcttaacagaacgctgttgctcaaaacatgccataaatgttagaaacttcttaaaaaaaaaatgcactcctgtaatcccagcactttgggtggtggaggcaggcggattgcttgagggcaggagttccaggccagcctgggtaacatggcgaaactccatctctacaaaaaaatacaaaaatgagctaggcatggtggcatgcacctgtggtccccgctacttggaatgctgaggtgggaggatcacttgagcccgggagaatgaggctgccatgagccgtgatcacgccactgcactccagcctgggcaacagagtgagacatgagccgtgatcatgccactgcactccagcctgggcaacagagtgagaccccgtctcaaaaaaaaaaaaaaaatgaagctgggtgccatggtgtgcaccctagctactcgggaggctgaggccggaggattgcttgaggctaggtatttgagaccagcctgggccacgtagtgagacctcatctctaaaaaaaaaatgcaaaaattagcagggcgtggtggcacatacctgtaatccaaactacttgggaggctgaggcagggggatcatttgagcccaagaggctcaagagctatgattgtgccactgcattctagcctgggtgacagagcaagaccgtgtctctgaaaacaaatctataaaccatgggttctgtgaacagatgtggacacggatgtgtgagatgtttgtatatgagtgtgtgacagtatgggtgccactgagtgtcaccacaagtctgcacatttagcaggggttggggacgggcaatgaccagcagctccttcaggctgcacctggctctgtccagaacaggagaggtcgagggtctcctgtgcacgaccctcgggggctctccagaggccgcacagcaggaacctcacattggatgtatctgctgttgtcccctcaggcccagcccccaagccaccctcccagcttcaacggggaagggctggagggccctcgtgtgagcatgctgccatccggcgtggggccagagtacgcagagcgccccgaggtggctcgccgggacagcgcccccaccgagaaccggctggccaagagcgatgtgcccatccagctgctcagcgccaccaaccagttccagaggcaggcggccgtgcagcagcagatccccaccaagctggcggcctccaccaagggtggcaaggacaagggcggcaagagcaggggctctcagcgctgggagagctcaggtgagccggccccaccccttcgcctgggcctggaaggtgcaactggtcaggctctagcggctcgctgggagccaggaaattcgggacacctgtgccatcctctggagaggaaaaccagaaggcacagctggcatcgtggctgaggccaccccacacagggccgtgtttggtctccaggcccaaaactgagatgatccaccctgcatcttctccacctcaaccctcaaaacagtgggatggggaccaggagccttagaaagggacacgggcaagaaggcagagatccctggccacgtgggatcagcacagccgggacagggacaggtgcaggcgcctctgctcattgtcccagttccacagagccgttccacagagtgggacacggagcccagagcagccccagtgtttccacggaggatgtccaggagctcctctgggggacacctccctgggggacaaccagggatgttctgggatgttctctgaagattaagggtgtgtcccgtggtcactagggcctgtgctatttccacaggaggctcagcctcctctccagatgccgggtgactctgcaggtccttccgcagggaggttggggccgttctccctgaatctggggcttagcatctgagcagctcaggtcacgggatccaggccgcccgtgggaagtgtcaggtgggggtggccaggcccctctgctctcggaggctgccctggcgggtggggacagctggccagcctggagctggcccaaataccttctctcttccagcgtccttcgacctgaagcagcagctgctgctcaacaagctcatggggaaagatgagagcacctcacggaaccgccgctcgctgagccctatcctgcccggcagacacagtcctgcgcccccaccaggtgagcccccaccccctgacatgagcccagtcccagggcagcggggctgcggcaccacccggcgactgctcagtctgaaccctctctctgttccagaccctggcttccccgccccgagcccaccgccagctgacagcccctccgagggcttctctctcaaggccgggggcacagccctcctgcccgggcccccagctccctcgccactgccggccacaccactcagcgccaaggaggacgccagcaaagaagacgtcatcttcttctaaaagggccgtgactcaaggtgcaaggcccctccctgccctgcccacccttcctgctctctggggacccccatggggtcaccatgcccacccagctgtcccctcctcttccctagcaaaccactgatgaccgcctggcaggggccagcctgtcggtgctctgggccttgcagctgtttctgtagggttagcggtggtgccggggtcactttctgaatctctttttttttttttcaaaaaggaaagtttttaatggaaagttgagccagaactaaaccagggagctgtctgaaatcatagcaccccatccgggtggcggggagatcaactccgagctgtttttccgaggcagtgaggaacggtgccggctctgcacggagctgaggacaggacagaccttgctttgagaaggagctgccggccggggccacgctccacagccgccgcgcgacagtggagccaagggttagggcaccaggaggggccaggtggcgtcggcagcatctgtccccagaatcaggcagaatccacttcccaaacagagccccacgcaggttcaccatgaacctcagggtcagggaatgagccaggcacgggggcatgggcagagagggccacggggcagggcccactgagggaacatcagtggccctccagtcaggttctgtgggtttggaagcccatcgtgaaaggggctgacctttgcccctttttacttggcattggttttgaaaccagctgtttcccaaactctgcttcccaagggcaaccgttgctgttcacacgctcagcctgtctgggggagcgggcctctagcttcagccagggcgggtacacaccctgggcacagggtcctcagcccccgggaaatgagctcccagggctggcgtcccaccttccaggtgggggctggcacatcacagactgtcgagagcgccatgtcccagggcatgcagaggatgcacctagagacgttgcagcaagtggacaagtggccgctgtgcgggcccctcgcttgtagtgagctgttgcagcttacggtccgttccctggaggggtggaggaaggaggtgttgggcagcatcaaaggtgctgggacatcccagggtggtgagatccatccacgatccagctccggtggagaaagggcccatgtcaagccttgttctgcaccccaagcattggtggtaggactgggtcctggctgatcgtccttgttcccagtggggtacatgtgagcccctgccagggccaagtccttctcccgaacccagggtcctgggaactgcagatcccggggggattcagcccttctcccactgtgctggcagaggcactcctgtgacgctgaatacagtgaacagggacattcccgccactcggggacagatgggcacaagggaggggaaactccatcaggaagtgctcccctgggcagaggcgcccactgggtgctgtgggctcaggagggggcggggcaggagctggtgccaaccgggaaccagagccccacagccatacagcccattggtgacaaggtcctgagaacacagtggccaggtgtccccaggctcctggcccctccgacgacctcaactctgcccagcccggtccctggccatcagcgacgctgtccgccccccgtcagatcccatgtgtgccatgtttatcatcagtgttttgtatttttgtactgagtatcggagcactttacagaagctgactgtacattcctgttctgttgtgaagagaacattcccagaccctggcaccctcctgagccggcgtgtgccggtccagccctccgagatgccacaattccttggatgggggagaagttcaaggaatttctgctcggccacgcggtgggaaccccgcgtccccgccatgtggcagaggggtctcagtcgtgctaggcatcgggcggcagcgccgacagcccttccctcgccagtgcccctcggccactcctgggttggagcccgattttatttgtaaagttgacagtcgagcaaatgttcctattttcgtgggatctgcacacgtctttgtcagttgtggtcatgatcttagtcacctgctaattatttttacaatgattacaacatttcctcactgcgggatatttctgacccgctttagaacttaagacctgattctagcaataaacgtgtccgagatgagcggtgactggcgtgcacgttcttggaggttttatttgaggattttcttctgcccaaacgttgctgcaggagtagcaggttctgttgggggctccccatggctcctgcccctcagctcgctcacctgccctccgtgtcctgcttaacgctctgaagaccccttcaggtccagtccccaggagttgttgggggttttgtttttgtttttgtttctgtttttttggtttgtttgtttttttgagacagagtcttgctctgtcgcccaggctggagaccagtggcaggttctcagctcactgcaacctctgcctcccgggttcaagcacttctcctgcctcagcctcctgagtagctgggattacaggtgtgcaccaccacgcccagctaatttttgtatttttttagtagacatggggtttcgccatgttggcgaggctggtctcgaactcctgacctcaagtgatctgcccgcctcagcctcccaaagtgctgggattacgggcacagggcaggagtggggcgtggaggtgcctgtggagggtcctgcccaccgggtacacttcaggctttggtggcgcctccacgaaaatctttttgcttttaatccacaataaccgcaaaggctggaactttcacttcctccatctggggtgagaggcagcttggccatgagtatgaaatcatcatttccacctggtctgagtcccggtccagtgaggcgaggaccctgctgtttcaacagagggtttcccatcacaaggggactaggtgtaaagtcgatcactagctcactaggaagcgcaaaaagggaactctcaggcagcactgtccaccaggaagatgatgcaggccacgtgtggaatttttcatttttagtagccatattaaaaaagtaaaaggagggccgggcacagtggctcatccctgtaatcccagcattttggggaggcgggggctgaggcaggaggatagcttgagcccaggagttcaagaccagcctgggcaacatagtgaaaccccttcacagaaaaattaaaaaattagccaggttggccgggcgcagtggctcacgcgtgtaatcccagcactttgggaagccaaggtgggcagattacgaggtcaggagatcgagaccatcctggctaacaaggtgaaaccccgtctcaactaaaaatacagaaattagccgggcgtggtggcgggcgcctgtagtcccagctactcgggaggctgaagcaggagaatggcgtgaacccaggaggcggagcttgcggtgagccgagattgcgccactgcactcagcctaggcaatagagcgagactccgtctcaaaaaaaaaaaaaaaaaaaaaaaaattagccaggtatggtggcgtgcacctgtaatcccagctacacaggaggccaaggcaggaggattgcttgagcctaggggttcaaagttgcagtgagctatgatcgtgccactgcactccagcctaggcaacatggtgagaccctgtctataagagcttaaaaaaaaaaaaggaaatttgggggatagaaaaaagaaatgaaatttaaaaaaaaaagaaaaaagggctggacgcagtggctcacgcctgtaatcccagcactttgggaggccgaggcaggcagatcacctgaggtccggagtttgagaccagcctggccaacatgttgaaaccccatctctactaaaaacacaaaaatcagccgggcgtggtggcaaacacctgtaattccagctactctgggggctgaggcaagagaagcggttgaacccggaggcggaggttgcagtgagccgagactgcacgattgcactccagcctgggggacaacagtgagacttcgtctcaaaaaaaaaagaaaaaaaggatgtaattaatttattacatttttatttatttttttgacatggagtcttgctctgtcacccaggctggagtgcagtggcacgctatcttgactcactgcaaccgccgcctcccaggttcaagtaattatcctgcctcagcctcccgagtagctgggattacaggcacccaccatcatgcccggctaatttttgcatttttgtagagatggggtttcaccatgttgaccaggctggtcttgaactcctaatctcaggtgatctgcctgtctcggcctcccaaagtgctgggattacaggcgtgagccaccgcgcctggtctattttttcttcattgtggtcaaatgcacacaacataaaactggccagttgctattctcctgatggtgggcattggagtgtgtgtgtgtgtgtgtgtgtgtgtgtgtctccccccaccctctgatttgctccaccccaaccccagccgtcctctgacctctgcctagctgacccctccactgggatgcccccagccttcctcagcactccttatgggccctggggggcttggaggcaccctaaaatgagatgttctgcaaagagggcctgtagtggctgggcacggtggcccacgcctataatcccagcactttgggaggccgaagtgggtgaatcacttgagcacaggagttcaagaccagcctgggcaacgtggtgaaaccccgtttctactaaaaatacaaaattagccaggcatgcttgggcgtgcctgtagtcccagctactcgggaggctgaggcagagaattgcttgaacccaggaggcggaggttgcagtgagccgagatcgcgccaccgcactccagcctaggcgacagagtgactctgtctcaaaaaagagggcccgtagtctttaaggttcacaaaggggtctgttcccagcccctaaaaggttgaaaaccactggaccagaatgggcaacccagggacagagtagtggtcaccaagcctgggggctgcgggtgggtaacagctgaggggtgtgaggtttctctctggggtgatggaatgttctaaggttgactgtggctctgcttgcacgactgtgaatgtactaaaagccactgaactgtcccccttctgtggataaattttatatgtgaattatatttccataaaactgtttaaacacacacacacacacacaaccacacacacacacaaccactggaccagctgagagagtgggagagcggcctccctttctggaagcatccaacctgtctgctctgtgcctgggctccacatggtcagtgtccaaggccttcccagcccaggctgtatccctgaaggtggcttgcttttcctcctggcacctgtgaccaggtggtcatgtggcttccccacacagaggcgctgctccaagggccccactggtatgagctagtaagtagttgggtctccaggtagacaatgagatgccctaatcatgcaggtgctgctaggggctgggaaggaggcctctgctgagggccaggacaggcctgcacccccgacaagggaaagaagggggaaacccaccaagcctggcccactcgtgagtcctgggcagaaggagcccccacagatggggtctcccgcacccgtgtgaccctgagcagtccccggcctcccagctgctcagagccacctggtatcttccttgtaaaaaacaaaccacaaatgtactctgggaggccgaggcaggcagctcacttgaagccaggagttcaagaccagcctgggcaatgtggtgagaccctgtctctacaaaaagtttaaaaattagctggatttggtgataaacacctgtagttcctgctattcaggaggctgaggtaggaggatcccttgagcccaggagtttgaggctgcagtgaggctatgatcgcaccactgcactccagcctgggtgacagagatcctgggtcaaaaagataaaaatcaaggcagtgcaattgatatcacatgaggcccaagggcgcacacacactggctgttgtgtgttcctgggccaggctgtgcaacaatgtctgccagaggccacatgtgcacagactctgaagggttgttctcagccagcagactaagcagtgccctcatcccatcccaccacacattggctgaggtgggagccccaagtatcttcagcgatgccagtgtgtgttgcccagtctcagcctggagcccttaaaatgctcacagtggccctgcgtcggcagcacagtggcatgaggccacgccctcgggtggcctgatgagaggtggcgcctctggcctgtgtgcccaggactctggggagtagagaacagccctcaatggctggaggccacttggggtccgtgggcaacgcttgctcaaagatggagaggacccaccgggctgagggcattcctgaaggtgggctggggtagtgtggtttccaactttgggtccgtcctgtggagggtaaggggccaggagccagcagtgtaataaccttcacccctgagccaggcgccagcaccacaatgtttaattgattcccgttccagctttctcaaggcacgacaggccccctcttcctcatcttgatttggatacaagacgccagctggcaggcaggaggtgctgctgaagccctgcacggcccctgaaaactgtcacggctcaggagctccaggctgaggcctgggggacctcgcatcagtccctccacccaccctgcccatgggtttcaccacaggcagctccatgagagccccggcccctgccctggcggcttctgctttgcgggaagggccctccgtgggctctggctgtgtccctgtgctcttccggcagtgtcagggggtagtggcctcggcctggccgccggcccgggccgcctggtacatgctgaggattgaggagatggtgcccatgaggcccactagccacggcgggaagcggccggcccacagcacgccccggggcagccagtgcacggcgttggccaggtcggccaggttgctgagaagtgacagcgcctccgactgcatctgcgcctccatggccctccgcttgccccggggcagcgggctgtggggcagagaggggccgcttacactcacgctcacacctgcctgcccttcccaagcccctgaatgccctgtgtggcctggcagccctgagcccctgcctgtgagtgggaggagctggcaggactgaggtggcctccctgaccatccacagagactgagtccccatcacccccccgacccaagcacgaacagggcaggaacccgggtccaagtcctcaaatccacacctcactcctcgtcctgaacacccagagatggggattccttgtgaaaaacagaaagcacaaatgcactttgggaggtgtggagggaagggggaacccccaggagcgtggcctgtgcctgcccggcctttctttatcaggatgacacagtgacgataagcctggccaatatggcgagaccccatctccaccaaaaaataaaaaacaaaattagccaggcgtgctggcccgtgcctgtagtcccagctactcgggaagctgaaacaggaggatcagttgagcccaggaggcagaggctgcagtgagccaagatggcaccactgtgctccagcctgggcaacagagcaagaccctgtctcaaaaaacaaaaagaaaaagcaacagtaacaatggccatggccttcgggaaattgatcattctctcctgctgggggcgcagccatgaaggctcagccctggagtccccgctcaagcaagcctcagtttctccatctgtaaaaggtaccgccacccaccagaggctgtgatgactcccccatgacctgagcacaacagtccccagcatgggcctgcacaggggtggctgcgagccgggatcccacgcctgctggagggagtgggcctccctgctgggtgatcacgggctcctacctggtgaagggcgccgtggggctccgcagcctctgtctcagtttcagcagcatccacagggacctgcagcaccagagcccgagggaggatgccccggcggggagcaggagggttagctccacaacgctggccccggacatacagtctgggacaggtgctgcatctcggataaacggcctgccctctccctgcccccacagtcccacaccctcctggctgtgcctcatgctcccggggactcatctctaacacggccccgtcccacccgggacatcgtcctgcacttctgacgtggccatccagggcctggcccagcctctgcaaaccactggcaagtgctcaaaggaacatcaagccccgtgaggtgttcacagcctggcagggagtcctacacagaaaaggatgccaagaggcccgcagttggacaggcgtggggacgccgtttcccctccgggcctcagctgccttgtctgctctgtgtggaaaggtccaaatcagtgccatgccagcaccccctgcacacacaccccggacattggctggacctgtctggatgatcccctgggcccccagggctggcatctgcaggctgaggaaggggctacccagtgggcagcctctgtgctcccagcaggctctgcagccgtgcatggcacccacccgggccagtccaccaggcacctgcactctccagcctcggccgtggggtgtgccgggttgtgactgtgacagaatgggcagggcctggtcacaactcctctggccactgggtacccagggtgcaggatgcaggatagcgccagtggcacagcaggtgggagcctcctggggggctagggaaaaacactgattcctgggctccccagacccacagaatcagaagctctgggccaagcgcgatggctcacacctgtaatcccgggactttgggaggccaaggccggtggatcacctgaggtcaggagttcaagactagcctggccaacatggtgaacccctgtctctactaaaaatacaaaaattagctgggggtggtggtgggcgcctgtaatcccaggtactcgggaggctgaggcaggagaatcacttgaccccgggaggtggaggttgcagtaagccaagatcgcaccactgcactccagcctgggcgacagaggaagactgtgtctcaagaaaagaatcagaagccctgggcgccggacccaggcatctccatttagcaacctcctggctgatgctccggcagccctgggccttagggcagatgtctggtcatgatgagcacacatggaatgctctccacccactccccctgctcactgcaaatccagagaaatgatgaaaaaccacatgcccgaaacaagaatgccgcagcaggcggggcacacaggacttcgatggccgtgaaacaattccatttgattctgcaaggggggacacgtgtcagtgtccaaacccataggatgcccaaaacctagcgtgaaccctaacgtgagctactcacttggggtgatgatggatccatggaggggcatcagttgtaacaaatgcaccatgtggatgctgccagtagtcggggaggctgtgtgtgggggtatatgggagctctctgaacgttatgctcaattttgccatgagcctaaaactgctctaaaaaaataaagtctgggccgggagtggtggctcacgcctataattccagcacttagggaggccaaggcaagtggatcacctgagcccaggagttggagaccagtctgggcaacatggcaaaaccgtgtctctacagaaaaaaaattacaaaaattagccagatatggtggcacagcctgtggtcccagccactcagaaggctgaggtgggagtattgtttgagcccaaggggcggaggttgcagtgggtcaagattgagccactgcttttcagcctgtctcaaaaaaaaaaaaaaagtttatttaagcaaaaaagaaaggaaccaaggctgcccctaaaatacaaaccagaggtcacgaggcacccagaggaaggtggcggaagagaggctgtgagccaaggcccccctctgaccggagccccaggaacatccaggctgggcccaggcaccctcccccaggtctcccagcacacagggaaggccagcagcacagacaccgctgcctccaggggccatggccatgaaacatgacccttttgagacagccaaaatgcacaggcagggtattaggtcaaaggctggaaaagaaccacccaagcttgaacagtgggagtctgggttggattgtgggtaattcgaatcttctactctgaggtttatctattttccagattgtctacggtaagcatgtaattaggacatctgtgccggggggaaaacaagaactactgagagtcagagcctcgaccagggacaagcaaagcttcccccagaaaaaggacacagcctgcctgaggctgggggcagccgcacctcaccccagcgatctaagagcccttcacagccactgaaacatggagaccagggggcccagctcctgctggtgttttcaggggcaggggattctgactcagcgcatttgcaaagaggaaaatgtttgggaggaaaccattactagaaagttctagaaactatatggttttttggaggcacagaactagtcaggaaactgctgactgttttctctggggtgtcggctgacagcaacgccagcaagactcagggacccgggtaaaggccactccgctggctgcttctcacaggccctggagttacttcttctttctaagtgtggtcagcagagtcatgaccccttctaaaatgtccatgtcctgaacctgtcaacatgttcacctccaaggcaaaggatattttgccgatgggattaagctaaggattttttctttttttgacacggaatcttgctctgtcgccaggctggagtgcaggggtgtgatctcggctcactgcaacctccacctccccaaattcaagcaatcctcctgcctcagcctcccaagtagctgggattacaagtgtgcaccaccaagcccagctaattttttgtatttttagtagagacagggtttcaccatgttggccaggctggtctagaactcctgggctcaagtgatccacccgccttggcctcccaaagtgctgggattacaggcatgagccaccacgcccaacctaagctaaggatcttgagatggggtattaccctggatcatccaggtggtccccatgtcatcataggggtccttataggagggaggaaggaggatgagggtcagggaaggaggtgtgacgctgaaagcagaggtcatgcttggaagatgaaggaaggggccatgagccaaggaatgtgggtggcctccagaagctggaaaatccaaggaaacggacctccccctgggacctccagaaggcatcagcgcctgctgacactagcccagggagtgttctgacttccagccttcagaatcctaagataagaagtttctgttgcccagcactacagagttgtgctaatttgttccgacagttattctaaacaaatacacccacaaaaggaagaaacaacaaaacctccaaggaaaactctaagaggcaaagacccaccgcagtctgaagcctgtgctgttgctggggccgctgccactttgctaaggaggcaccgcccagggaccttgggtgctcccttctggcccatgccacttacctggcaacccccaggagcagagagagggcccacagggttgtactcagcgtccaccaccgagaagagtccacgtggaggacccgggcatcagccgcccaggccacgtgctcacaggggtagtagagctggtcagccaggttccctaggacggagacacagcggacaaaggcgtcctcctcctgcaggaccaggagcagagggggcctagggtcagacttacccactgcccattttagcaccgtagccatgccaggtggcagagagctatttcctgaccccagtccctgggccgtgtccaggcctggcaggccccgcgggagaaaggctctggggctggggtccccgcacaggcctgatttctgtgtctcggcagcacggtgctcagtgccccttggagggaggctctcaacgcagctgtgcagtgcagtcctctgcagagcttcaaaaaccccatgcccaatgccagccgtgaggattctgcctcactcagcctggggcaggccccagtaccgggaattttcacagggaattttcacattcccaggggattcccaggccaagttgggagccctgtgtcagagccttccttcccaaaggcttccagttcctgcacaggtggggacctctgttgccagactctatgcagggagcatgaggtggcccgcagcgaaccctgaccaggctgagatggtgtgccaacccttgggccaccgcacgcccactgctgaccacgcgccaggcacagtgcggcaaggctcatggcctccctcaactccgagcaagttacagacggccacgctgaggctctcagggaaagccgctggcccccagttccggcagggatgggcctccaggccctcgaattgcaatgcacacgcgggctctcggtcctgcacagtgcccataccctctgccccaagttcttaatcacacggcctagagccagcgaggcaggaccagttgaggctgtagaaaccagcgctgaagcctggtttctgggactggagccccgcagccaaccgggggacccgcccccttgggaccccaccccccttgggaccccgcccaccgtgaccccgccccatcggagccccgccccctctacctttatcctccttgttacctgccacacccttcccctcctctctgacttcccaggaagctcctccccgcccccaccgctgattccagatgctgctctccttctttctggccagtcatgatcctacctccctccgggctctgaacctcactccagcttccctcatctgcctggcgcgtcctggcacattgcccacctccctgaggatggcggaccccgccccaatgtgctcattccgcccggatttcctgagaagcggcagggtccaggctagactctggggaggggcagaggctcaccagggcagggaggaacgcagacatataaaccgggaacccaacaaacagggctcttgttctggccaagggacactcgaggtgcaagggcctccaccccttgcctgagggctcttccacagagggcatagaggaacgaggggtctcagggatgcaccagagcgctgtcctaatcagacacggaggaggaggatgctataggtgtcaaaacaggaaggcggcccacagcaacacttatgatataggatgatcaggccaaggacacgtggtgctgaacacggtggggttgggatttcggggcggggagcacctgagtagcaagtggctcagagaggtgatccctgggaggacagagagaacagacagggcagcccagggaggggcaggacgctgagaggctggcccacgcagcctctgagatcatcccgtggggggcaagatggctctctagataggctggcacgcctgtgggacgccgcagggacaaggctactctctgcagcactgtcgcaatagcaaaaccttagaaatcattgccctgtgcgtcaaccagaggccaattaaataaatccgaagctgcatagcagagcactatgtggtcctgagaacgcagctctttctagaccgataagaaatgatctgtggccaggcgcggtggctcacgcctgtcatcctagcactttgggaggcggggcaggtggatcacttgagcccaggagttcaaggccagcctgggtaacatggcaaaaccctgtctctacaaaagatacaaaaaattaaccaggtgtggtggtgcacctgcagtcccagctattccggaggctgaggtaggaggatcacctgagcccgggaagtcaaggctgcagcgagccatgatcacgccactgtactccaggctgagtgacagagtgagaccctgtctccaaaaaaaaagaaagataaagaaatgatgccgaagctgtaccgttaagtgaaaaaagcactgtttatgtaaaccatatgtatttgcctatgcgagtacaggaaatctcacaaaggagacacaagaagctgaccacagggccgggcacggtggcgcacacctgtaatcccagcagtttgggaggctgaggcaggtggatcacttgaggtcaagagttcgagactagcctggccaacatgacaaaaccccgtctctactaaaaatacaaaaattagccaggcatggtggggggtgcctgtaatcccagctacgtgaggggctgaggcagaaaaatcatttgaatcccggaggcagaggttgcagtgagccgagatcacgccactgcactccatcctgagtgacagagtgagaccttgtctcaaaaaaaaaaaaagaagctgaccacagtggctgcctctgtggggaaaaattggaggcctggaagatcaggaaggagggaggttttttaaaattatatcctcctttggaatgtgtgaacgtttgctatttttaaaaatttaaatcaaaatgagaacatctgatcctctcaaagaagaaagtgaaatttttaaaagtaataaactacccacgcagggagcactttgggacaagactataaaacgcccatggtggctcacgcctgccatcccagcactcagggaggctaaggcgggaggaccacctgagcccaggagttcaaggctgcagtgagctatggtcactccactgcactccagcctgtatgacaaagcaagaccctgtctataaaaaaaattttttttgtttgttttatttgagatggagtctcgctccattgcccaggctgccagtgcagtggcacaattctcggctcatggcaacctccacctcccaggttcaagtgattctcctgcctcagcctcccaagtagctggaactacaggcacacgccaccatgccaggctaatttttgtattatcagtagagacagggtttttttttttagacggagtctcgctctgtcgtccaggctggagtgcagtggcgcgatctcggctcactgcaagctccacctcccgggttcaggccattctcctgcctcagcctcctgagtagctgggactgcaggcgcctgcaaccacacctggctaattttttgcatttttagtagagacggggtttcactgtgttagccaggacggtctccatctcctgacctcgtgatccgctcgcctcagcctcccaaagtgctgggattacaggcatgagccactgcacccagccgagacagggttttaccatgttggcctggctggtctcgaactcctgacctcatgatccgccagccttggcctcacaaagtgctgggattacaagcatgagccactgtgaggggccaaaaaattttttaaaaaatgtccactcaggtccgcaccctactccctagagccccacaaaccctgttacctgtgcccccaggccatattgcttagtgtagacaaacatggccaggtcatcaaagagtcgcaagatggtcctgcagtggctgagttgggtggacaccaccaacagacgtgtccccacttcggacctggcgggacactgttcaaccagaactccaccaaccagctggcagcagtaccccagcactcggatctgtgggaaaccagaagcagtcagtgtggccctcctgttctgcagaactgagctgcatccccccatacctggccccgggccccgctggattgagagtgtggaagattctcttttttttttgaaagagtctcactctgtcatccagactggagtgcagtggcacgatctcggctcaccgcagcctccatctcccatgttcaagcaattcttgtgcctcagcctccccagtagctgggattacaggcgcccaccaccacaccctgctaatttttatattttttgtagagacagggtttcaccaggttggctaggctggtctcaaactcataacctcagtgatccacctgccttagcctcccaaagtgctgggattacaggcatgagccaccgtgcctgacccaagagtttggaagattctaaatctacaaagtgacagtaaaagctgaaagtttaggtggggcacagtggctcacacctgtaaccccagcactttgagaaaccgaggtgagaggatgccttcacaccaggagtttgagaccagcctgggcaacatagcaagaccctgtgtctaccaaaaaaatttttttttttgagacggagtcttgctccgtcacctaggctggagtgcggtggcgcgatctcggctcactgcaagctccacctcccgggttcatgcgattctcctgcctcagcctcccgagtagctgggactacaggcacccgccaccaagcccacctaattttttgtatttttagtagagatggggtttcaccattttagccaggatggtcttgatctcctgacctcatgatccacccgcctcggcctcccaaagtgctgggattacaggcgtaagccaccgcgcctggctaccaaaaatttttttaagttaacagggcatggtggttacttgggaggctgatgctggaggatcacttgagcccaggagttccagactgtagtgagctgtaatcgtgctactacactccagcctgggcaacagggcgagaccctgtctaaaaaaagaaaaagaaaaagaaaaaaaaagctggaagtttaaaaacatacttggaggtgggacaaatgaagaaacatgacatcattgatgtaactgaagggcacagcctttgggaacagatgtgacaggaacaaagaaaacaaagctccttacttcccacctcctaggtccttcttttcccaggtggcaggaagccacagctaaagtgtatatttacatctacctgcctggaccaaagcctttggatgtgctgaatggtgggcacaggtgatcaggcctcaacccagtgaacaacaggataatttggtagaattactttagagagaaagaacctactcagtaggtgatgtggagccttctgaaataggtcatcttcactactcagatcttttttcttttggagacagagtcttgctctgctccccaggctcgagtgcaaaggtgtgagctcactgcaacctctgcatcccaggttcaagcaattctcccgcctcagccttccaagtagctgggactacaggcacgcaccaccacatccggctaatttttgtattttagtagagacgaggtttcatcacttttcccaggctggtctcaaactcctgagctcagacaatccacccagctcagcctcccaaagtgctaggatcacaggcgcgagccaccacgcctggcctcccttatatctttattttacctgcttttcagaaattgcttgttcctgttgttttatttatttttacttgtaattcctttccagccccattataatggcaaaacactgcaatctgaatgttcaactcgggggagatttgttaacccacccccccaatcataagatatttgaatggaatctaaatgcctagccaccagtacaccgcctggtacaacctgaatgtctacctataagagactggtggggacaagctaagagtccagactcaggggcatggatggcataacctaaatgttcaaccatatgggacttgattggaactaaaaactgtccagccatagggagagtcttgcaatatcctaaatccccacatgagattgtttgggacaacccagggaccaactacagtggcccggtcagatcctaaatgtccaaacatgggaatctgtttggtatgtaaacgtccagccaggctgggttggcagagacgatctaaatgaccaactggggttttgttggaacccatcgctgcttaggcatggcagggcccaggccatggcgtgttctttggtctaggttggctgaaacaacctaaatgcccaactatagggaatctggttggaagtgaatgtccagccacaggggagccctgcaacatcccaaatcccaacacgagattgttcaggacaacttcagtggcctggtcggatccaaaacgtccaaacacgggaatctggccagtgtgtcaatgtccagacaggttgggttggcagaaactatctaaatgtccaacgctggccagacgcggtggctcacgcctgtaatcccagcactttgggaggccgaggcaggtggatcgcttgaggccaggagatcgagaccatcctggctaacacgatgaaactccgtctctactaaaaatacaaaaaaatagcagggagtggtggcgggcgcctgtagtcccagctactcgggagtgctgaggcaggagaatcgcttgaacccgggaagcggaggctgcagtgagcagagatcgcaccactgcactccagccaaaataaataaatacataaatgtccaatgctagggcaccgcatttgagcctagctcggacggggcctctgcgacggagtatcctgggcgaccccgtcccctctctggcccgtttcccagtctctgagcttgggccaaactctaggacctccggccccggtccgcccctgcctcaccaggcggtcccggcccctgtacgactccagcgccgacgccaggccgctcagcgacgccatggcaactccgtgacgtcaccgcgacgtcggcgcgccgcgccagggggcggggccaggccggggtaccgggagcgccccaaaggcttgcgcgcaggcgcggccgcaggcctttgtccccctgaccggctttttgtccgctgtaggggagggacagagtttgcagaggtggggccgacacgtgtgtgctctccaggcctgcagaccctggatcatcctcggagtttgctgcattctgccccacggcggtttggccaactacccacgcacaaaaaaatatatttctaagtttaaccaactacccacacgctccaaaaatattccaagcaaaaccaccaacctgttcgcagtggttcaaggagagattttcctttttagtttttgtgcttcaccttttctgcactgtctgcctgcccgtagtgagcaggaatgactgctgtaatatcacaacaaggcatctttcgacgttaaggaaagacgttatctttggacgttaagaattgttctagaatacataaataaaaaataaaaatgcacaattcagtgacattagtacatgcacatgttggacaaccatcaccccttgctagtttcggggtatttttatcacccccaagagagacccccgtaggagaccagcatatgcccctctgaaatatgcgaccttggtgtaggattattttgagctgagatcaatgaagctgataccggaaaagctctctgttcttccctgatttgcctcaaagcaggacctaaaggtacaaaggtgccctcctcccctctctaccaggaaggacaaaggttgatcaccagggacacctttagactcttgtctggagacgtcttttttttttttttctttttttttgagacggagtcttgctctgtccccaaagctagagtgcagtagcgccatctctgctcactgcgtcctccgcttccctggttcaagcgattctcgtgcctcagcttcccaagtagctgggatcacagctgtgcaccactgtgcccggctaatttttgtatttttggtagagtcggggtttcaccacgttggccaggctgttctcaaattcctggcctcaagtgatccgcccgcctcggcctcccaaagtgctgggattacaagcgtgagccaccgcacccggcctcaatgtccttttccttcgtcttgtcacttctccaaaaatttgctgctatatgttgaaggtgctatataagcaggagttatataagctatataagccacctcatttctcttggcatctcccatgtacacataaggtacacatgttaataaatttgtttttcccttgttaattttttttttttagacggagcctcgctctgtcgcccaggctggagtgcagtggcacgatctcggctcactgcaagctccgcctcgcgggttcacgccattcttctgcctcagcctcccgagtagctggcactactacaggcgcccgccaccacgcctgggtaattttttttttttttttttttttgtatttttagtagagacggggtttcaccgtgttagccaggatggtcttgatctcctgacctcgtgatccgcccgtctctgcctcccaaagtgctaggattacaggcgtgagccaccgcgcctggcctctattttttttttttttttttttttttttttttgagacagggcctcgctctgggaggaaccaaatttgtagatgtgaagccgccacttgtgtgctctctgggcctgaggacccaggatgatgcccagagcttgctacattctgccccatggtagcttgaccaactacccacaaaaaaggggtagagtgcagcggcacgatcttaactcactgcagccttgaactcctgggatcaagccatcctgccacctcagcatcctgagtaggtgggaccacaggtgcctgccaccacaattggctaatttctttttattttttattttttgtagaaatggagtcttaccatgttacccaggctggccttgagccctgggcttaagcaatcttcccacgtcgaccttccaaagtgctggaattacaggcgtgaaccaccgcacccgcccttcttaattctttcattgcaaggatccatcacagctaagaactaagaataaaggaaaaagtatgtttcctcccctacaccctgttcccataaagcaatcactcaattcctccctcctcccagcccctggcaaccactaatctgcattctctgctgtctctctgtatttttaccacttcttgattttttttttttttttttttttttgagacagagtctcactctgtcacccagactggagtgcagtggcatgatctcagctcacggcagcctccgcctcccaagttcaagcaattctcctgcctcggcctcccaagtggctgagagtacaggtgcgcaccaccacacccggctaatttttgtatttgtagtagagatggattttaccatgttggccaggctggtcttgaactcttgacctcaagggatctgcctgcctcgacctcccaaagtgctgggattacaggcatgagccaccatgcccgacctccttgatatttcatacaaatggaatcatacaatatgtgaccatttgtgtcggcctcttccaccaagcataataggttgttttggtttttgctttttgtttttgagacagggtcttgctgtgtcaccaggctggagtgcggtggtgtgatcatagctcactgcagccttgaactcctgggcctgagagatcctcctgcctcagcctccacattgcctgggactacaggtgcacgccaccacatctggccaatttttaaaatttttcttttgtagagatgcggtctcgctatgttcaccaggctggtttcgacctcctggactcaagggatcctcctgccttggcctcccaaagtgctgggattacaggtgtgagccactgcgtgcagctgagcataatggtgttgaggtttgtctaagttgcagcatgtatcagaaattcattccacttgcagctatataacattgcgccatatggatggaccacattttgtttatccacgtatcagctgatggtcatttgggctgtttctgccttttagcgatcgtgaataagtacagctataaacatttgtgaatatgtagttggagtccctggattccattcctttgggtctatacctagaagtggggttgctgggtcattttgtaactctatgttgaactttttgagtaattgcccaactgtttcccacagtagcagtaccattttccatccccaccagcattacacaaaggttccaatttcgccacttccttgcaacatccttttttgattatgatagccatcgtagtaggtgtgacgtgccaccccattgtggttttgttttgccttttcctgatgactaatgatgtcaacgagtctgtttgttggtttgtttgaatttttttttttgagacagagtgtcactctattgcctaggctggagtgcagtgctgatctcagctcactgcaacctccacctcccaggttcaagcgattctcatgcctcagcctcccaaatagctgggattacagcacacccgccactgtgcccggctaattttagacttttagtagagacggggtttcgccatgttggccaggctggtctccaactcctgatctcaagaaatctgcccacctcggcctcccaaagtgctgggattataggcgtgagtcaccgcgtctggcctcgatgttaaccagttttctttcacagaatatttcctcttgatttcaactcttgttactcttctcctgcattgctttcctcctgttgtttaaagttacagcagattcctgcctcaggaactttgcatgttctgtttcctctgcagaaatgttcttgagccagataccaacgtggctccctccttccctaacttcctttactcgaatgtcatcctctcacgggacccacccgatcacaccctcctggacacttcctacccatgttacctgctggtgacctgtcttgttcatggctatatccgcacagcctggcagaaaacagagaatctgttttgtaagtttcactgccctgtccaaagatctcttcttgtgctccaagggagcatggaacacaagggggcacaagaaaggccttgtccactcctgtgattttcttcctctctgtctctctctctttctgtttttgtttttaaacagagtctcactcggttgcccaggctggagtgcagtggcatgatttcggctcactgccatctccacctcccgggttcaagcaattctcctgcctcagcctcccaaccagctgggattacaggcacctgctaccacgcccccactaatttttggagtttttaatagaaatagggtctcaccatgttggccaggctggtctcaaactcctgggctcaagtgatccacccacttcggcctcccaaactgctgggattacaggcatgggccaccatgcccagcctcttttttttttcttcttgtttgtttttgagacagggtctcgctctgttgcccaggctggagtgcagtggcatgatcatagcaccactgctgcattgaactcctgggttcaagtgatcctccatcctcagcctcccatagcactgggattacaggtgtgtgccaccacacctggccccaagagactctttaacttccacatccagctccttttaagacttgggtccactggctgagctcagtgactcacacctgtaatcccaatactttgggaggccaaggcaggtggatcacttgaggtcaggagttggagaccagcctggccaatatggtgaaaccccgtctcaaaaaaaaaaaaaagacttgggtccacgggtctttgtgcactcccctctcccccagtgggggggtcactctttttttttttttttagagtcagagtctcgctctgtcacccaggctggaatacagtggtatgatcttagctcactgcaacctctgcctctgggttcaagtgattctcctgcctcagcctcccaagtagctaggattacaggcacccaccaccacgcccagctaatttttgtatttttagtagagatggggttttgccctgttggccaggctggtctcgaactcctgaccttggggaatcctcccatctcagcctcctaaagtgctgggattacaggcatgagccactgcgcccagccacggggtcactgttttcacagcagaaaaattgaagccaagccagctgcagtggcctgtgcctgtggtcccagctactcaggagtctgaggcacgagaatcgattgaatccaggaggtggaggttgcagtgaaccgagatcacgccactgcactccagcctgggcgtcagcaagacccatctctaaaaaagtaaaacaaaaaaaaatccaaagccaaggtccagacatgcagaggaaagaggtcactggccgcaaagcctgctgctgcatgaataagcagatccctcctctcaggcccaagagccttggaacagcgcaatgcatttgcccgaatgcttcctgtgtgccgggtcccgctctaggcaacagagatacagcagtgagctttgcagacacagcccagccctcccagcgtcccccatctggctaggtctgagctcgacctttgaaaaagacacaggagctggcctggtgttcacagctggccttggtgttgctaggagctggcctggcagtcaaagcagggccctggtgtcctcctgctggacataaacaatctcacatgacgccgacatcagacaaggccactctgtgaccgcggcagagcaagacaaaacaagcctgctccataatcatgtctgaacacaggcaaaacacgaacactgtccacactatcagagtaactggacctcctctgctactagctaataccagcaacggctgttccttaccaagcacagctttagtcttctgacttctttctttctttctttccttccttccttccctccttcccctccctccctccttccttccttcttccttcctttccctccctccctgcttccttccctccttctctccctccctccttccctccttctttccttcttccttcctttccctcccttcctccctccttccttcccttcgtccttccttccttccttccagctcccagcttccctggagctctaaggaggcaggatttgcacaaaaaacaaaaccgtgcccccaaaacacctaacagaactgcagatcccaaatccctccctccctccctccctcgctccctcccttccttccttccctccctctctccttccttccttctgacttcttcatacagatgattaagatgctgaataatagttacttctctccctagctgctcttttgttttgtgttgtttctgagacagagtctcactctgtcacccaggctggagtgcagtggcggaatcatagctcactgcaccctcactgcaacctcaatgtcctgggttcaagaaatcttcccaccttagcctcccaagtagctgggactataggcacgcgccaccgcacctggctttttaattttttatagagatagggtctcactgtgttgcccaggctggtctcaaacacctgggctcaagcagtcctcccgcttcagcctctcaaagtgatgggattacaggcctgaggcactgcactcagccgcccttgcttctttttttttttttgagacagagttttgctctgtggcccaagctggagtgcagtggcacgatctcagttcactgcaacctccaccacctgggttcaagcgattctcctgcctcagcctcctgagtagctgggattacaggtgcccgccaccatgcccagctagttttttttttctttgagacagagttttgctcttgtctcccaggctggagtgcaatggcgtgatctcagctcactgcaacctccgcctcctgggttcacgcaattctcctgcctcaggctcctgagtagctgggaatacaggtgcccgccaccacacccggctattttttatatttttagtagagacagggtttcaccatgttggccaggctggcctcgaactcctgaccaaaggagatccgcctgcctcagcctcctgagtagcggggattacaggcgtgagccaccacgcccggctaatttttgtattttcagtagagacagggtttcaccgtgttcgccaggctggtctcaaactcctgacctcaagtgatccacccaccttggcctcccaaagtgctgggattacaggcgtgagccaccacaccaagccacaacagcccttttctggacgctactttgggaggctgagattacaaatgtgagccaccatgcctcacctgtgtgttgtttttatttgtttttatctgctcatctcaaaaaagaaagtaaaatttccaaccaataaattcatcccacccaaatcccctacttccttaagctgtgcccccaaaacaccgagcagaattgcaaatcccataataagtgctttctggccgggcgtggtggctcacgcctataatcccagcacttcgggagactgaagcgagcggatcacccgaggtcggcaattcgaaaccagcctgaccaacatggaaaaaccccatctctactaaaaatacaaaattagctgggtgtggtggcacatgcctataatcccagctactcgggagcctgaggcaggagaatcacttgaagccggaggttgcgatgagctgagatcgtgccactgcaccccagcctgggcaacaagagcgaaactccatctcaaataaataaataaataaataaatagcgaaaaaaagttctttctaacacctccctactgagaccgccatagtgccctatgacatgtatgagctctctctccctctctctttctttctctctctctctctgatgaataataagcttgaatgtgttcaatcacaggtacattcctggtggtctttgactggggaaggaggggtgaccggcccctttaaagggagatctgtgagccctagaataatatcaagaggtgcagtgattcagggaagtgggtccattctgtgtggggtgtgtagaaggtagagggacagaaaaactttagaggatgataataataatggacaccagcagcctatttaatcaaatcctcaatactgacactgctttctgaactggctaccatcattagtccccttttgcagatgacaaaacctaagtcctagccaggcatggtggcacacacctgtggacccacccacttgggaggctgaggcgagaggatcgcttgagcccaggacttcaagtccagcctgggcaacatagcgagagcttacctcaaaaacaaaaccaaccgaacaaaaccccagaggctccaaaaagtcaattacttgcctgggttcctggagctctaaggaggcagtattcgcaccaagcctgcctgctaattttcctcccggctgcccctagaggtgctgagtggtcattgtgacagtatcattacacaaaggaagctcttggggtcacaatgcgcagggctggaccacccttggatgcagcctgggaaggaacatgaggatcctctgagagaccagggacagagggagacccaaagatctggtctgtagctaagtgaattttctaaaactcattgattcacacgccatcccttgaggtaggtgcactgtcctcgtccctgatgtacagaggtgaaaactgaggctcatgggagcttaatgacttattccaagattacctggctagtagtctcagttgttggattctctgatgacccattttggaggtcatattcaactctcaactattgcagggggcaaatgattcaaaaagcagcaaactcagccaggcgcggtggctcatgcctgtaatcccagcattttgggaggccgaggagggtggatcacctgaggctaggagttcgagaccaggctggccaacatggcgaaaccccgtctctactaaaaatacaaaaattggccgggcgtggtggcggacacctacagtcccagctactctggaggctgaggtgggagaatcgcttgaatccaggaggaagaggttgcagtgagctgagaaaaaaaaaaaagcaacaaacttacacactgaaaaactgtggtttcattaaaacacacacacacacatacacacacacacacacacacacacacacacccttcatccatgttttctttctatttttgtgatggggtttcgctctgtcacccaggctggagtgcggtagcgtggtctcggatcactgcaacctctgccacccaggttcaagcggttctcccgcctcagccttctgagtagctgggatgacaggtgcatactaccatgcccagctaatttttgtatttttttcttttttttttttttttttttgagacagagtttcgctcttgttgcccaggctggagtgcaatggcgcaatcttggctcaccacgacttctgcctcctgggttcaagctattctcctgcctcagcctctggagtagctgggattacaggcatgcgccaccacgcctgactaattttgtatttttagtagagatggggtttctccatgttggtcaggctggtcttgaactccgacctcaggagatctgcccacctcggcctcccaaagtgctgggattataggcctgagccactgcacccgtctgatccatgttttctaaataggtagaggtaagcaggttttgtgggttgaagtgatctgggaggtcttcctgcaagaggtgagcctgagaacttggaatgctggtctccaagggagacagagaggagagcatgggagacacttgtgatctaagcaaaggcaagaaagtcccaggtgactgagcagaggcggagggtcaggggaggcttggagtctgaagctgaaggtcagaggagagagctaactctcagaaggtgtgaagacaggaagagattgagaataggcaggacctaggacaactgcagagcaggggaaaaccagtaagaaagtgcgtggcaggccgggcacagtggctcacacctgtcatcccagcactttgggaggccaaggcagacagatcacttgaggtcaggagttcgagaccagcctgaccaatgtggtgaaaccccgtctctaccaaaaatacaaaacttagacgggcatggtggcaggtacctgttatcccagctacttgggaggctgaggcaggagagtcagttgaatccaggaggtggaggttgcagtgagctgagatcgtgccactgtactccagcctgggggacagagtgagactctgtcacaaaaagaaaaggaaagaaagaaagagagagaaggtagggaagtgaaaggagcggaggggaggggggaggggcgggggagggggagagaagggagaaaaagtgtggcagaaacggagatggccagtggctggggtgcagggctggagttaggcagaggaacaaaaatgggtcccccagaggggaagaaggagaaaaccgtggccttgacaactgactgagggtgagaagacgcggttcttgtatcagacatacagtagaatgcagtggttaattctccaagttctagaatcagagtcgccctgggttcaaatctcaagcaaatgaccacctccctgagcctcaatgtcttttgtgaagcagtggttaaaacctacccttggccaggcatggtggctaacacctgtaatcccagcactttgggaggctgaggcagaagggttgcttgagcccaggagtttgagaccagcctgagcaacatagccagacccctgtctctaaaaaaaaaaatagaaagaattagccatgcatggtggtgcacacctatagtcccagatgctcagaagactgaggtgagaggaccgtttgagcccaagaggttgagcccaccacacttgtctaatttgtgtgtgtgtgtgtgtgtgtgtgtgtgtgtgtggagacggggtcccactatattgcccaggctggtcctgaactcccgggctcaagcagtcctcttgctctgacctctcactgtgcctggatacaggtgtgagtcacagtacccagctattaccttctaacctactcttcaatttttgttgttatattttttattattgtctgtcatctcccgccccattatcaattccacaaaggcagggatctaggtctattttgtgaactaatgttagttccccacccctgctggcctccaggcctagagtagggacagaaatcatttatgtggtgcctactgtgtgccaggcctacagtaggcaccacatgaaagatttttttttatgttttgagacggagtctcgctctgtcgtccaggctggagtgcaatggcacaatctcggctcactgcaacctctgcctcccgggttcaagcgattctcctgcctcagcctcccgagtagctgggactacgggcgcccaccaccactccaggctaattttttttaaaaattatttttagtacagacagggtttcaccacgttggccaggctggtctcgaactcctgacctcaggtgatccaccggcctcggcctcccaaagtgctgagattacaggcgtgagcccccgcgcccagccatgattatttctgtctctgctctcgctgggggaaggcacagaagctgtaccagtttcccgtgatgtccccagcctccagctcagtgcttggcgaacagaaaggagtcaaaggcagcagaaaggagtcaaaagcaggagtcaaaggcaagtgccccaatgggcacttgctcagtccctcatctccaccctctcgcaggtggctggtgtcccgcgatggccacaggcgccctcctgccgtgctcgcgcccgtgcccgatgtcccggctggacttcctcaaggcctcgcacttctcgctggggcctgacctgcggctgcacgagggcaccatgcgcaccacgtcgcaccgggactttgcctacccggctgccacccgggagccgccgagcctgcagccgccgcccgcgctgcttttcccaatggacccgcgctgggaccgggaagagcgcgtgtcggaggcgcaccgcgcgttcccgccgccatccacgccgccgtgggagctgctgcaagcgcaggcgcgggaacgcacgctcgccatgcaggccggcaacctgcacctgcacgaggacgcgcacgccgggatcggcctctccaacgcgcacgccgcctacggctggcccgagctgccggcgcgcacccgagagcggatccgcggcgcgcgcctcatcttcgaccgcgactccctgcctcctggcgaccgcgacaagttgcgcatcccgcccaccacgcaccaggcgctctttccaccccacgacgcgcgcccgcagcctcgcgcgcccagttgccacctcggtgagcgcgcgcccgggctgagtgggcgatttgcttcacattgtggttctcaaacaggggcaagggctcttcattccccttcccccagggaacatttggcaatgtctggaaacgcttttggtggtcaggacttggggggtggccgggcgcggtggctcaagcctgtaacctcagcactttgggagttggaggcggggggatcgcttgaggtcaagagttcgagaccagcctggccaatatggaggaaccccgcctctactaaaatacaaaaattagtagggcgcggtgaagggtgcctgtaatcccagctacttgagaggctgaggcaggagaatcgcttgaacccagggggcagaggttgtggtgagctgagattgtgccaccgcattccaacctgggagacagagcaaggctccgtctcaaaaaaaggaaagaaagaaaggaagaagagaaagaagaaagagagagagagagagaggaaggaaggaagaaggaaggaaggaaaacaagacagagaggaagggagggagggagggaggaagacttggggggtggcgaggccacccgcggtggctcacgcctgtaatcccagtgctttgggaggcctaggcaggaggatgtcttgaggccagaattggagaccagcctgggcaacatagcgagacccatctctacaaaataaaaattttattatttttttattatatatatatgtgtatatatttttttgagaaagtgtctctgtcacccaggctggagtgcagtggcatgatctcggctcacacagactaaatctgcccagctcaagtgatcctcccacctcagcctcccaggcagctgggactgcagacacgcatgtcaccaggcccagctaattttttgtacttatttgtagagatgcagtcttactatgttgccctggcaggtcttgaactcctgggctcaagcaatccatctgcctcgacctcccaaagtgctgggattataggcatgagccactgagcccagcccttacaaaataaaaatttaaaaagatgggcagaggtgctaccagcagacagcgggtagaggccagagatgctgccaagtatcctcccagccagccccaaatgtcaattacaccaagcctcagaaaccctggaaccaccttgagcatcagtttcagcatcaggagggtggacatatcctctgaatctgtccagagtggtgcatggttggcagaagtcatgaatgccagtttggggtcagacaaatcagctaagttccccagctgtacaccctcctccccacaccccccagccttaccaccttagtagctgtgtgagtctgagggagttaacctctccaagcctcagtttccccgtctacaaaatgggtgcaatcacagggcccaattcacaggagctagtaaagctgaatgtgtatggtgtgtctggtgcagagagcacttaacaaagagtagccagcattcgtgtaattttccaattctgtgactccagggaccctttgggtgaacattactggtcagaggcccctaagatgggctcagggattgtcaaaccctgatttgacatttagttgtgattcctagtttctgtgatttctggcaagttgcttaacctctctgagcctcaaggaggctgtaacaagagaaatgataccaggtccaagaagaagttgcggccgggtgcaatggctcatgcctgtgatcccagcactttgggaggctgaggcaggcggatcacttgcggccaggagttggagaccagcctggccaatgtggtgaaaccacatctctactaaaaatacaaaattcagcctgacctggtggtgcgttcctgtaatcccagctagctacttgggaggctgaggcaggagaatcgcttgaacctgggaggagcaggttgcagtgagtcaagattgtgccactgcactccagcatgggccacagagcgagactccatctccaaaataaaagagagacggagagagagatactcagtcctggaaaaagatgcaatgcacttaacctatgtgtggctcaatatagtccttggtagatattattggggtttttttgttttattgtgtgtgtgtgtttttgagacagaatctcactctgtggcccaggctggagtgcagtggcacgatctcggctcactgcaacctccacctcccaagttcaaattattctcctgtctcagtctcctgagtagctgggactacaggcacatgccaacacacccggctaatttttatatttttggtagggatggggtttcaccgtattgatcaggctggtcttgaactcctgacctcaggtgatccacctgccttggcctctcaaagtgctgggattacaggcatgagccaccacacctggctgtatttttaaatttatcattattttttagagatgagggtcttactatgttgcccaagctggtctccagctcaagatgggctcaagcccatctttgcacttcagccacctgaatagctgggattacaggcatgggccattgcacctggcttttagtataatttattttatttttatttttatcttttggtgtttgccagacagctctcagtctacactgttcagaatggcccagctccccttcccaggcaagaaatagaattccttccagagggcttgagatggcagggaatctcaatctctctctctctccccccatcccccttgcctatcctaagggggccccaacaccctcaagtgggactacacgagacaagatgggacttcctaccaaagacagttccaggccctgccaggcccacctgccttgaggtgtaagagggtaaattgaggctgtgttggggctgcaggcgggggcagaattgggggctgggtggtttgggccttcctatccctgtctgcccacaggcctcctccggagtggagctgggagactgcaagatcagctatggatcaacgtgttcggagcagaaacaggcctacaggccccaggatctgcctgaagataggtataaaggggccactgcgggcacggtggctcatgcctgtaatcccagcactttgggaggctgaggcagacagatcatgaggtcaggagctcgagaccagcctggccaatatggtgaaaccctgtctctactaaaaatacaacaattagccgggtgtggtggtgggcgcctgtaatcccagttactccggaggctgaggcaggagaatcgcctgaacccgggaggcggaggctgcagtgagccaagattgcaccactgcactccagcctgttcgacagagcaagactccatctcaaaaaaaaaaaaaaagtgggggacgagggggcactgccttcccacccagatgggacaactggctttcagtagcatgtggtatttgccccttagggctttagggcccatactctgcctctgaggtctctgtcactggtagccaaggtgcactattgtgccagatctctcattatcagagccccacagcttggtcattaggaaaccctgctcccctccctctttctgggggttgcaaggccccagatggatccactttagcttcttcttcttctttttttttttctttttttttttttgagacgtagtctcgctctgttgcccaggcttgagtgcagtggcacaatctcagctcactgcaacctccgcctcccgggttcaagcaattctcctgcctcagcctaccgagtagctggaattacaggcatgtgccaccatgcccggctaattttgtatttttagtagagatggggtttcaccatttttgccaatctgttctcaaaagcctgacctcaggtgatccacccacctcagcctcccaaagtgctgagattacaggggtgggccaccatgcccagcccactttaccttattcttgatggaataatacactacgtacaggtatgacaaggcccaggccacagcccacatccactgtgtaaatatccgtcctggtgacggcctcttccgcgacaggaccaccaaggccgagcacttctatgccagggagccaggtgagagcctgaggcccgccccgtcccgcctcccaccgcagcctcccagggcagctctgcacctgttccgcttctggcagagccttttgttcttcaccacgatcagactccggagtcgcacatcctgaaaggaaattggtgccccggccccggcagtctggacaccttcatgcagtacttctacggccaggtgagcaggaagagcgaaaaggcggcagggaaaagggcttcccagacagagcaaatagcaggtgcagaagtcccaaagtgggagtgagcttgatatgtatgcaggaatctcctggatgtacttgagtgatctagggcgagtcacttaaccactccgatcctcctccgtggctccttctgtaaaatgagataagagtaccaactcccagtgctaccaggtggggcccagaaggggtgagggagctgtccaaggtcacacagagcccacctcctccctcccccccgggcccggggacctctcggacgccggagctttcaaatgccatgtggtcctacagccgccacccccgacccagccacccagccgccacgtgcctcatgagaaattgcagagtcatgtgaccctaggggagccaaagctactcaaacgcttcttcaagaccaccatgggctcggactactgcccttcagagtggagacaggtgcagaaagcgcccaacctccacttgcagcaaagctacctgccgcggggcacgggcggtgagcgctcccgggaagccccgccccatggagccccgccccgggaagccccacccccgaaagccccgcccccatggagcccctccccatggagccccgcccccacggagccccgtcccgggaagcccagccctggaagcctcgcccttgccactgctctggccccgcccctaaccagccctcccctcccccggcttcatcccctgaaaggctaaatcccacccccaattgaccagaaccccaactctgctcctggataatcccgccccttcatggccatgcctctccccttcataactccatccttctggacacggccctgccccttctccatcctctcttatccagtcttaactcctcttccattgtcagactctggctccgcccctgacccgctagcctgccctgcctggccctgcccacagactcatctggcccggccccgcccctgaccttcttagccctatgccctagctctgggttcctcccctagctcctccgtcctcctccagctcctccctcttcccaagctcctccccctttctctggctccttcctttgtcccagctcctccctctttcccagttcctccctcttccccagctcctctctcctcccctggctccttcctcctcccccacctcctccctcttccccagcgcctacctctttcccagctcctccctctttcccagctcctcccccttcctctggcttctccctccttctttggctcctccctcccccctctcctaatccatttttctcccctggtcaacttcagcgctggcctgggcttggctcttgaacccttcccttgaacttcaccacaccctcagccccgcctcggcccacagccctcactcagcctccccaacctgaatctccagaattcgattttttaaccatgaaccagaagatgctgaagccacacagaacacctccggccccggtgactgaagagatgctacagcgggtaagggaggcggaggggagccacccatcattaggcaacccccacattggtgtagagttatctcaggacgactatgctgtcaccctgtctcagagttagtgatcacccaggctcgggggcatcttaatatcccttcagcctgaagatcatccctagcttggccgggtgcagtggttcacgcttgtaatcccagcgctttgggaggccgaagcaggcggatcacctgaagtcaggagttcgagaccagcctggccaacatggtgaaaccccgtctctactaaaaatacaaaaattagtcaggcatggtggcgcatgcctgtaatcccagctactagggaggctgagacagaattgcttgaaccagggaggcagaggtttcagtgagccaagatcgcaccattgcactctgggctgggcaacagagcaagactctgcctcaaaaaaaggaaaaaaaaaaatagaggtcatctctagctcaccccccagggtcatgtcaaggtcagctcaggggcatctttgcaccaccaccactgttatacccaagacgagggttaattcagagccacccaggatcaccccagccctggagtccttccagggacacccctggtttctctccatcttcttatccagctcctcattcagcccagcctggggccctttttgcccacctctccccagagttcaacctccccagcctttgatgctctggctctgtccctaggcggccccaccttaccccaggcttcaccttctgaagggctaaatcccaccccaaattgaccagaaccccaactccgcccctggacaatcccgccccttcgtggccaagccccgcccctgcataactccacccttctggccatagcctcgcccctttccctatcctctcttacccagtcttaaccatcctccttggtcagacactggctccgccccgaccagctagcctgccctgcctggccccgccccctgactcatcaggcctggagatcctggggtggacagggtggatcggccacctcccaggctgccctgccaggctgtccaccctgtctccacagtgcaagtacagccacatggagccccctctgggtggactgcgcttcttctcaacacaatacaaggacgagtttcctttcaagtaccagggcccagcagccctgagactgaaaaatcctcaggagggcttcgtgcccctgggcacgcctcaccagcgcggctgcagggagaagatagaccctctggtcccccagccccctatgtacctgtgccccagccagcaataaatgccatcttggcaacattccactctttcccatcagtcagcccatccagaggatgcttgggtgggtgggggctggaggaagggactgcacgggaaaggatgactccactgttgctgcgttgccatgaagagtatggagtcaaggctgggcgcggtggctcacacctgtaaccccagcactttgggagactgagatgggaggattgcttgagcccaggagtttgagatcagcctgggcaacatagggagatcctgtttctacaaaaaaaaaaagataatcggccaggtgcagtggctcacacctgtaatcccagcactttgggaggccgaggcgagcggatcacctgagatcaggagttcgagaccaacctggccaacatggtgaaaccctatctctactaaaatacaaaaattagccagatgtggtggcacatgtctgtaatcctagctactcgggaggctgaagcacgggaatcacttgaacctgggaggcggaggttgcagtgagctgagatcacaccactgagctccagcctgggcagcagagtgagactaagtcttaaaaaataaataaataaataaataaaaattttagaaagccaggcatggtggtacgtgcttgtagtccaagttattcaggaggctgaggtgggaggatcacttaagcccagaaatttaatgctgcagtgagctatatgattgcaccactgcactccaatctgggcaacagagcaaaaactctgtctcaaaaaaagaataaagttatagtgctgaacagagatactggcgtgcgtacttcagaacacagatccctggggccggggaagggtgggggtgctggatgggcataatccaaactcggactcctccacgtcctgggtggtagtttgggcaagtcacttaacccctatgagcctcaatttgctcatctatgaaatggggataagtagcaattctcccatgagactgttatacatgagaaatgtacacacttttcagtgcatggggctggggtcgtggaggggaagcttcccttctgaggatgagaatggggaaggccagggtgtggggaaaaagctttcaatggtggggacactggatgtggcccatagaggacatggaagagtggacacagctgagaataacccagcagttttttccatcatggacagagactagagaccgaatggggcactggttgtctgggcaactggtccccaggtcagagcagagtccaggggcaaattgacaaaagccatcaagatattatgaggtccaggggggtaagtgttcagccagggacaaaatgtaaagggtcaaaaggaggaggatgtgatggggctctgcagcaagtgagtgacagggcttagcaaggaccagtaccttggacagcgcctgacctttaaggtccagggcatggtgaggagaaaggtctgtctggggtaaggtctgtctcgggtaaggtaggctttagtgaccatgccggggcctgcctctgtgggctgttgaacatccagtctcaaggagtgaacatggctttcctgaaccaagaatcaaacctccaaagaccaaggaccccaatccaatgaaccataaggttgagccaatctcgaccctgcccaggagccctttcctggttggcatcagttcttctaggccaggttgtcatttctgcaggaaaggcaggagggaatccagctttgcatcctgtagggacaagatgacccttttggccacacatggtatccacctcgaccatgcaagaatctgccagctgtgaatatgtcctctaaagatatttggcatcatgctcttctgagttacttcaggataaaccagggcttatcatttatcggtgtcttagatcagatcattctttattggaggctctcctgtgcattgtaggatatttagtgccatccttgtcctctacccactaaatgccagtagaacctctccctcccacttgtaacaaaatgtcccaaatattgccatatatcttccagatgggagagaactgccctggttggaaaccacttcgataagctcatcctcttctgatgaagctggtctgcctagtgaccagactactagaacagaaaggctttccctttttgccttgccttctgggaagctcagaatgtttatttggtcttaagttccatgtagctgtagttgcaggattatcttcctgcctcatcccaggaatggtttaaaacagccttaggcattagatgaaaacagtccatagcaattaaaaaagagctggatttcagcacaacttggagcactttctgacaatgaaaatgaccagccctaggatggcttgccagggaagaacagaaactgtactggaaatgtttaatccttggggaaagacactacatcaggattattctggatgtattttatggatttatgactaaccctcctatattccactcactcccttccttcccccaaaagcctagggattaagacaaaaaaatatagaattgaatgtgagaaaccaagatttttttttttttcgaaacagagtcttgctcttgtcacccagcctggaaagcaatggtgcaatctcagctcactgcaacctccgcctcctgggttcaagcaattctcctgcctcagcctcccaaataactgggattacaggtgcccaccaccgcgcctggctaatctttgtatttttagtagagacggagtttcaccatgttgctcggctggtcttgaactcctgacctcgtgatctgcccgccttggcctcccaaagtgctgggattacaggcatgagccaccgtgcccagcccaccaagattaatttttaaaggaaaacaactttctcagtggtaagcgtcacccagcagcagaattcagacctgcctttctgtccttaggcaaaaatacaccctgaccctcactttccttatctgtaaaatgggaatgccaatagttcccgtttcatagagtggttacaggaattaaataagaggtgcatgtaccatgctcagaagagggcctggcacttggctgcagctcagtgaatggtgactaaatgtgttaatgtcttacgtcattttgttgcaaatgacagaaaccaagctccatctggctcaaggaaaaaaaggaattttattgatttagaaaaagacaggccagacgtggtggctcatgcctgcaatcccaacactttgggaggctggggcgggaagatcacttgaactcagaagttcaagaccagcctgggcaacatagtgagatctcatctccactaaaaataatttagaaaattagctgggcatggtggtgtgcacctgtagtctcagctacttgggaggctgaggtgggaggattgtttgagccaagaagattgagtctgcagtgagctattatcattccactccagccttggcaactaagcaagtttctgtctcaacaataacacacacacacacacacacacacacacagacacacacacacacacagaaacaagaaggtctgagtctggaattgggtctaatatcaggcattttgcatcaggactctgtccccctggccatctctcagtcctgtgtccctccaagcaacagcaaaggaagatgctggtagtattttccaatcattatgattagatcccccagagaagggcggggtctttccaccacgctccctctatcgaattttggtttttgttttgagacatctgtcacccaagctggagtgcagtgatgcaatctcggctcactgcaacctccgtctcctgggttcaagcaattctcctgcatcagcctcccaagtagctgggactacaggcatgcaccaccatgcccggctaatttttgtattttttattacagacgggatttcaccatgttggccaggctggtcttgaactcctgacctcaagtgatccgcccgcctcagcctcccaaagtgccgggattacaagcatgagccaccacaccgggccccatattgggatttaaggaacaggctgattggcccatttgaatcactcaccgagttgtggaccaatcactgtgcccagaggaaaacaatatggtgattggtttgcccagctcaggaacccacccctaggttatttaactccccaaacccagccaggatcacggcgctggagcccaaccttaattgactgtgtctcctaaggacaaatctgtgtcctgccccaggttgcaatctggagggtggattagctcagctaataggctcttcccagtgagagtgattgtcagctttgcagacaaggaatgttcagcgtttgggagtagtttagggtgtcagatgtcctcccataatcccagtcttatcttctacctcatcatctgcctcgtcttttagcctggggcggaaaattcagctctgaggttctcacaagatgaagcagatgattctctgctttgagaagaaacacattccagaaacttgtgtctttcttgcaagactttgctgaagattgcatgaaagctgccccaggccaggcatggtagctcacacctgtagtcccagcaagttgggaggatcgctgaagtcaggagtttgagaccagccagggcaacatagtgaggttccatctctacaaataaaatagtaataatagccaggcatggtggctgtagtcccacctactcaggaggctgagtccccaggtactcatctgtagtcccagctactcaagaggttgaggtgggaggttggcttgaacccaggagttcaaggctgcagtgagctatgattgtgccactgcactccagcctgggtgacacaatgagaccctgtctctaaaagagaaagaaagcttccccatattccaatattctggtccttaggagacacatggttagagttccatgaaaaaatcagtaactatttatttatttatttatttattattcatttatttttgagatggagtctcgctctgttgcccaggctggagtatagtgtggcacgatctcggctcactgcaatctccacctcccgggttcaagtgattctcctgcctcagcctcccaagtggctaggattacaggtgccctccaccatgcccggctactttttgtatttttagtagaaatggggtttcaccatgttggccaggatggtctcaaactcctgacctcagtgagccgcccatctcagcctcccaaagtgctgggattacaagtgtcagccaccgcgcctggccaggcaacaatttaatccgctggttttcttccacataactctagttttctgggggaaagctcttttacaaagccccgtatacatctagacaggtcgtgcattgcataacttaaggtgccctattcactttatagtccatgtatgtggcaaccctggctctctatcccatctttctttagtttgttccacattttagggttttttttaaaagattttttttattactctttcctttccaggtaataattcctaaattagtcaagactgtcacggatgcaaagaacagacatccactaaaaccagctcaaacacccagaacatttgttggtttgtggtacaggaaagaatgagttctgtggcttcaggtacggctatatccaggagctcaacaaatatagccagagctatctctctgactcttacttgtacatcttggtgcatattgtcctcagtctgcagaccgttcttttgaacaactggggaaagtggctgcaggcagaatgagccccctgtggctcataaccccagaagtagagtgagaacctccaatgtcaccttctcaacccatacctaattattgtggccaggggataggggccctttgattagagtccagctcacgtgggactgggaaggggtgttagacacatgtgcatctggagtagtggaggggaccccacaaaggaaaagaaagtactgttagattctgagccaaagaaacaacagatgtcatcacatgtatttgtaatgggatcatccaggaagtgtcaggataaggaaccaggggcataatccaattgaagttatctccaatctctcagatctgctgtgggctctgcggaaagatggaaagcaggtctcaggctgagtctaacacacatctagaaggttcaggaaggaagaaggaaccatagggtgtctctataaggaggacatggggacagaggagtatcttatagaatttgggcttgtacttggtggtttgcattttttgttttgtttttgtttttgagacggagtctcgctctgttgcccaggctggagtgcagtggtgcaatctcggctcactgcaacctccacctcctgggttcaagcaattctcctgcctcagcctcccgagtagctgggattacaggtgcctgccaccacgcctggctaatctttgtatttttagtagagacaggatttcaccatgctggccaggctggtctcaaactcctgacctcaagatccacccgccttggcctcccaaagtgctgggattacaggcatgagctaccgcacccagcctatactgggtggttttacagagaattactagggtggtattgtcgggaacctgggagcgctttgctgactaggtatttcagtgatttttgtctcagaggtgggaggatggcagttgggttggaattgtcgtcggtaagaagtggcagtcatttgtgttcacttggagagggggatgagaactcatttttgtggttgcacagggcccatgtctctatcttggttcagacatggtcacagagtggccttgcctcatcattgtttatattctgtgaccattgtttatatttagtggagaacatcgcggcccagccatcaggagctgatttccactctctctcctggctggcagcggggatctgtgtctccaaggaaagtttgccccgagcccttcccggcccggcgtagggttctccggaaaccatcactcacatctagcacttggaggcctccagggacagcggtgacccaccatctgggtaggaggctgaaaacactagaggaggaatatcccaaatctgtgccttggcgggtgttacccagaaagggtgacgggtttcaccatgcaaaaaggaaaaattggaggaaggccaggttaagcaaaaatagacatgtttttagattgcagagctgagaggcttggctgtgcctatgtgcgctgcaagtctccaagaacaacatgtgtagagttttacgaacaaagatagagtcagagacatgggcaggaggcagagacagagagagagagacagacagacacagagagagatagaggcagagaaagcaacagaggcaaagagattggaacacagagaaagagatggggacagagacacagagaaaggaacagagatgggaagacagggacagagacagagaatgaacagagatagagagatagggacggagagagacagagagagggacagggatggagagaaagagatagggccagggccacagagggactgagacaggcccaggaggagactagggatggggccagggctgcgtgcgggcggggcacggtgcagacaaaggcgcggccgcgcggtcggggtggcctggccggggacaaaggcctgcccggggggcgggggcagcgatggcgacggccgcggcgggcgcgggcgaactacaagtcccagcagctcccgctgcggccctcggccggcccctctcgctccccgggagcgcctggcggggccgctgggccgagggggccgccggcggggctggcgggcggggggcttcctgcgggcccggggggagccggcggccggcgcgggcgcggcgggccgggcaggggcgaggggcgccgggtgagtgtccctgcgagcgggctggggccggggcggggggctgggtggggggcgggcgggcgggggagctccaggcgcggggcgcagcccggggcgacctctaatcgtcccccgccctgcgcgccgccggccctggcccaggcgagcgggggtcgcgggagcgatggggaggggactctgcggccagctccggcctagcgcacccatcccgccgctggggcccggggggaaagggccaggaggttgggagccttcaatcgggcggggtggggggcgcccgccagctctggggtctggagctcaggacgccccctccctaggaggcgatccaggaccccctcccctcctgattcgaggtattgttcccacctcccgcctggggtctggagttcaggaggccctgtcctcaaaagggggacctaggggttccctcttcccccaggaccctaggaagggtcccagcgattgttcccttgcccctccagtcttggggtctgcagttctggaagctcctttccctggaggtgatccaggggtccacctgccctcacccctgggaactcaggaaagacttaagtgatttctcctcccaccttccagttaagagatgggaattcagggggctccttcccctggaggcaatctaagggttcctctgcccctgatgcaggaggggtcccaggtcttgtttcccccactctccaactatggggtctgggttgaggaccgccgtccaggaactcggctctgtttgcctgcacactcccagctatggggttgtggctcagtgtattcctttccccagaaggggagccacaggtccccccacagcttctcccaggagcagatcattcattgttgacacctcaacacccagccatggggtggggagctcaaggcatcctcccggcaggtcatcctgggctcccattgctccccagaagtggttccagcttttgtccctctacctcccagtctgcccctagccacaagctggcaattcagttcaggatccttcctgcaggaagggctacaagtgtgctgacactacccgccatgtcccagccatgggaggagatgactcaggcgttcccccattaacttcagagggtccccaggtattatttttgcctatcctccagctagaagttaaaatgcaggaccttctagccaatagggaaaacaggtatactggccgggcatggtggctcatgcctgtaatcaccatactttgggaggctgaggtgggaggatcatttgagcccaggagtttgagtccagcctgggcaacataccaagaccccatctcaaacataaataaataaataaaacaggtatactaacaactgtccccaccatcctgcctatggggttcatgagtctccctacccatccctcctcaccaggaggggtcccaaatatcactctaccatgctcactatctggctgtaggaaagggcatttccgatctgtctaagagagaggatttgacactgactcccacctggagctgtgagctctggaattcaggttttcttttccccagagggcaagccagagtcttcttgtctttccccagtgacttgggagggatacctgatgttatttgttccatattcttatcccccagacatgggttctagagctcagaatgctgctgctggaggggggcctccctaccagaactcgccccctaaattaatctgccgcctccaagtatgggacaagaattcaggccatgtgctcaggagcacagaaacgctgacacccacactgttccccatgtggggacgcccagcaagggggtaggaagctaggactgtctcctccacaggaccccagcttcccacaagaggagcccaggttggagagaggtgcagagccatggagttggggactagaaacctctagtgctgggtctcatgacctccgtccaggtttggggctgagaggggagggtcctaccatgtcccacctggttccctcaactccctgccctggctggggtaagtcagaaatctccttgcagtcagagacaagggaaggatccacgtgtatgctcagaagtgagtggggtttggccaggcacagtggctcatgcctgtaatcccagcactttctgaggccaaggccagaggtttgcttgagtccaggagtttgataccagcctgggcaacatagcgacaccccatctcaaaaaagagagacagagggagagagaaaggaaagaaggaaggaaagaaggaagaagagagagaaggaaggaaaagaaggaaggaaggaaagaaagaaagaaagagagagagagagaaagaaagaaagaaagaaagaaagaaagaaagaaagaaagaattgaagttagctgagtgtggtggtgcatctgtaattccagctacttgagaggccgaggtgggaggatcgcttgagcccgggagttccagtctgcagtgagctatgtatgatcacatcactgcactctagcctgggtgacagagtgagaccccatctcaaaaaaataaaaataaagaagtggggctgggcgcggtggctcacgcctgtaatcccagcactttgggaggctgaggcatgcagatcacctgaggtcaggagtttgagaccagcctgtctaacatgctgaaatcccatctctactaaaaatacaaaaattagccaggcatggtggtggacacctgtaatcccagctactcaggaggctgaggcaggagagttgtttgaacctgggaggcggaggttgcagtgagccgagatggtacctttgcactccagccttggcaacagaacgagaccccatctcaaaaaaaaaaaaaaaaaaaaaaagaagtgggttctgggggcacaatcgggtcccgtctctcatccctaaccagactccaaaagacacccccgctcccacagaacccacctaccctctaccctctatccttgcccttgcaggtcttgccccagaagctgcgggcacatccacgcctgaaatgcggcgctcagtcctggtcaggaacccaggccacaaaggcctgagacccgtttatgaagagctcgactctgactccgaggacctagaccccaatcctgaagatctggacccggtttctgaagacccagagcctgatcctgaagacctcaacactgtcccggaagacgtggaccccagctatgaagatctggagcccgtctcggaggatctggaccccgacgccgaagctccgggctcggaaccccaagatcccgaccccatgtcttcgagtttcgacctcgatccagatgtgattggccccgtacccctgattctcgatcctaacagcgacaccctcagccccggcgatccaaaagtggaccccatctcctctggcctcactgccaccccccaggtcttggccaccagccccgcggtgctccccgcccccgccagcccgccccggcccttctcctgcccggattgcgggcgagccttccgccgcagctccgggctgagccagcatcgccgcacgcacagcggcgagaagccgtaccgctgccccgactgcgggaagtccttcagccacggtgccaccctggctcagcaccgtggcatccacactggggcgcggccgtaccagtgcgcggcctgcggcaaggccttcggctggcgctccacgctgctgaaacatcgcagcagccacagcggggagaagccgcaccactgcccggtgtgtggcaaggccttcgggcacggctcgctcctggcacagcacctgcgcacgcacggcggcccgcggccccacaagtgcccggtgtgcgccaagggcttcggccagggctctgcgctgctcaaacacctgcgcacgcacacgggcgagcggccctacccgtgtccgcagtgcggcaaggccttcgggcagagctcggcgctgctgcagcaccagcgcacacacacggccgagcgcccctaccgctgcccccactgcggcaaagccttcgggcagagctccaacttgcaacaccacctgcgcatccacacgggcgagcggccctacgcctgcccgcactgctccaaggccttcggccagagctcagcgctgctccagcacctgcacgtgcattcgggcgagcgtccctatcgctgtcagctctgcgggaaggccttcggccaggcctccagcctcaccaagcacaaacgggtgcatgagggtgcagccgctgctgcagctgccgcggccgctgcagctgcagcagcggccgccggcctgggcctcgggcctggcctaagccctgcatccatgatgaggccggggcaggtctccctcctgggtcctgatgctgtttctgtgctcggctctggcttgggcctcagccctggcaccagctctggccgcaaccctgaccctggctctgggccgggcactctgccggatcccagctccaaacccctccccggctccagatccacccccagccctactcctgtggaatcttctgacccaaaggctgggcacgacgctggtcccgaccttgtgcccagcccagaccttgatcctgtgcccagcccagaccctgatcctgtgcccagccctgatcccaaccctgtgtcctgccctgacccctgttctcccactcgtggcactgtcagcccagccctccctaccggcgagagtccagagtgggtacaggagcaaggggcactgctggggcctgatggctgaaggagacgccggcatcctcgggggcctggggaagttgtgtgttgtgcagtcagtaaaatcctcccactgcctccgggctctgtgtcgtggcttgccttttgtgctttctttctgagcacagccccttgctccggagatgggacattgtggccagggccagccacaatctggagctccagtgtcctggcttccttcttgggcccaccagctagactttccagcttaacccacagtgtctcatcctggtccatcccactagtcaccactctctgttcctctcacttaccccttgctcttcaaagcccatacagtaggtatacaagtggacaaaaaaagttgctcatttatgcaatcaacaaacatctctggattgctggggtctcagcagggaacaagataaatatggcctcgacctgcatggagctcatagatactaaattcagaatacttaaaaaataattacggggtatagtacattctaggagaagcataacaagacttctgatataaatggcaggcagctttctcaatgaaggattttgtaatcccaataatcactaatttaataatcagtactgtttgcccagccttatgcgatagtttttgcattctctcatttaatcctctcaacagccccagtaggtagatgactttgaatatccccattttgcaaatgagaaaattgaggcacatttttttttttttttttagacagtcttgctctgttgcccaggctggagtgcagtggtgtgatcatagctcactgcagcctcgacctcctgggctcaagcgatcctcccaccttagcctcccgagtagctgggattgccggtgcatgccaccgcccactgcgctcagcttggagttgaagggactctggaagatgtagaagtggcattgtcagtgcctagatttaaatcccaattgccctccagggtccaaattcttaaccattacgctccagggcaaaagtatgcaaaggctctggggctatagaaagatgagctttggatggaggtaggagccagatcagagggccctgatagacgagagtggggactctgcctgtcattacagagcaatgggaagccgagggcaggttctcgcaggaaggataggaattattctttgaagatgcttgtggctgctgggtagagagtggagtggagggaggctgagatcggggaggaggttgctgcaaagatccaggccaggaatgttggaagactctgggctgggggccatggggtggggataagtggttctatttgatacataattaggaaatcgtgtttgctgaagatgcgcaggagaagggtaaaaggagtttctgggagaaagaggaagacagcgttgagatagtaggcagggtcatcaccaggcaccaaggaggataaggggtcaagctctggacatggaagtcacaagcctggcaccggattcggggcatggccgggagccagggcagagctcgtcgttgccaaactcagagtcagcccatcccccgccacccagagcgcgtcggcgctaggacctagcgactgccttcgacccagagggcgccggcagaggcacgcatgcgcgctgttccggcaggggttgtcgtggcgcagggggcgggaccagaggcggtcacgtgaggggctctgggctaccgggtcacgtgaccgaggcacagatcagctgatgccggagggtttgaagccgcgccgcgagggagcgaggtcgcagtgacagcggcgggcgatcggacccaggctgccccgccgtacccgcctgcgtcccgcgctcccgccccagcatgacagccccggcgggtccgcgcggctcaggtgagggcgcgggcggcaccgtggggccccgaactcaggcgggcgggctgtgtctcccacctggggcggcggagctcctagtctctttttttctaagctccagcgctgacttttcacggtggagaaaagggcagacggctcctagaacttgggcggcgggtgggcaccagcctctccaattcttcctcctgaacccaggctctgctgggttcccaaactcaggcagggatcgcgccgggccgccagcttctccctctggggcggcgaggttcctgggattcccactgggagcctaggttccgattgctcaacttcgtctggaactcagacagcgggcaccagcttctccaacccgcacgtgagactcccaggcttcccctcctgattccaggggacaaatgctcagcttccctaagctcaagcctggagagctggagggattgcccccaggcgattaactcagttttagctttccaaaccgctggaagcgcagccttcttaaattcgggcttctagccaattctgatgccacccctcctcggggaggctggaggaagaccccttgtgttagcttccccttctggagctagctggggacccctacctgatagatgtcccggtgtcccagctagtagggtctggggtgggttagctgtaatctcagctctgtaagcgggccctgccctctggctttgtcgtaaacagccacagcagcatctcattgcaaagggaggggccgggaacttgtccctctctgcaagggaggttctgacagtgcacacatttatcctgactgctttgctaggcaggaggccaggccctagaaagcagcacggggccaggccctagaaagcacatccccatgggggtgtgacagggacagttttgggctactgtgactggttttgactccagcagttgctgaaagcttagatctaaccattaggctggaaaaaaataaacagtgattagaacagcttgtgtttgctgaagaggtctttatctgctgtgtctcactgaattctcagagcagcttcaggatctcaacctcaaggctcagggagagggtggactttttttttttttaataaacttttttttgttgcccaggctgtagtgcagtggcataatcctagctcattgtaacatcgaactcctgggctcaagtgatcctcccaactcagcctcccgggtagatggggtcccagctactaactacgggcatgagccgtcacacctgactatttaaaaaaaatgttttttttttgtagacagggaggtctcgctgtattacctaggctggatcctcccaccttggcctcccaaagccgttgggataacaggcatgagccactgagcccagccaaggggtcgcctttttaaaatttccactcttcagatgaggagatggaggctcagggaggtacctggagtcaacctactgtaaagtggcaggtctgggatttgatgctagggctgcatgatttctaggagctggtgcttttcagggagataaaatgagtctttagcgaatgtgttccattattattacttatgttgtcaattacctcttctccaggtccttggcttctgagagtgtcagctgatgggccaggttataatgaacccagaggtcatcttttgggtatttgtccagacaaacctagaatacaggctgagttctatgctcatgtctggaagctggagttgggataagcccagcaggcttgaacgcccagtgaaaagccagtgggagcagttcattctctccccactgatcaataacgggaacattgatgaaatgttctgacattcaccatggaccagcccctgtgatcaatgcttcataagcatccagtccttagcgttcccatgagacatattattgccccatttcgcagatgaggaaactgaggctcagagagctggtgagcaggaggggcaggaatcagcccaggccctgtacctcccaaacccaaactcataacctctgagcaggacgggtgcatagatacctacaatgtcacaggttttctggttttctttagacctctcagagctcttccttggcaggagcatggggacatgaagatagggcgtgtgctgccttcctggttggagaaaggggaaaaggggagttgcccaggcctcaccccagtgccctctcctattcccacagagaccgagcggcttctgacccccaaccccgggtatgggacccaggcggggccttcaccggcccctccgacacccccagaagaggaagaccttcgccgtcgtctcaaatactttttcatgagtccctgcgacaagtttcgagccaagggccgcaagccctgcaagctgatgctgcaagtggtcaagatcctggtggtcacggtgcaggtgaggccagccaagcaggggccccagctgaaggccacctgtggctgctgtgctccttgaagagagtcttaaagcagcactttggaaggccgaggccggtggatcgcttgaggctgggagttcaagaccagtctggccagcatggtgaaaccccatctctactaaaaatacaaaaaaattagccgtgcgtggtggcgggtgcctgtaatcccagctacttggcaggctgaggcaggagaatcgcttgaattgggaggcggaggttgccgtgagctgaaatcatgccactgcactccagcctgggcaacagagcaagactgtctcaaaaaaaaaaagaagccgactctgaggctcagagaggttaggagacttgcccaaagtcacacagcaatagaacattgggagctgggatttgaacccaggcagtctgacaccatgttgacccaatggctgcacagatagttctccctcccccatgccagaccctgtgctgggctctgggaaccccaagatgaatcagacccagccactgccctaagtgcttacttcatgttttgggctgactttagcatgtcaccatgcctctaattttccctctgaaaagggacccaattgtccaggcatggtggctcatgcctgtaatgccagcactttgggaggctgagttgggtggatcatttgaggccaggagtttgagaccagcctggccaacattgcaaaaccccgtctctactaaaaatacaaaaattagctgggtttggtggcaggtacctgtaactcagctactcaggaggctgagacaggagaattgcttgaacccagggggtggaggttgtagtgagctgagatcataccatggcactccaacttgggcaacagagtgagactctgtctcaaaaaagaaaagaaaagggacccagtcatggtacttaccctgaaagtttgggtttaacacagaatcggacatccagtaaacatttaatgaacgttagtccctgcagtgagatagatgagtccccaccctgtgttgtacgggggaggacacagtggtgggcgtggcatggagcttatgccaggaggtggggtgaaattaatcaaagcaaagaaatgcacaagtgaaatccgtgtttgtggcccaagttagcagggccctgccccaccccagtggacatctgcagggccctccctgtcctcttccagggcctgtgccctgagggagatacaccccaacccccatcctagccatgccaacctctactaccctctccccagctcatcctgtttgggctcagtaatcagctggctgtgacattccgggaagagaacaccatcgccttccgacacctcttcctgctgggctactcggacggagcggatgacaccttcgcagcctacacgcgggagcagctgtaccaggccatcttccatgctgtggaccaggtgctggtgggcgggcaggtgctggtgggcaggcaggtgcaggtgggcgggcaggtgcagttgggcgggcaggtgctggtgggcgggcaggtgcaggtgggtgggctgcagagagcgggccggactcacaggccctccccttctctgcccacagtacctggcgttgcctgacgtgtcactgggccggtatgcgtatgtccgtggtgggggtgacccttggaccaatggctcagggcttgctctctgccagcggtactaccaccgaggccacgtggacccggccaacgacacatttgacattgatccgatggtggttactggtgagtgggcaggacgaggcttcactgttgggagcctgagctgctgggattaaaatcaacagctgtggctgggcacggtggctcacgcctataataccagcactttgggaggctgaggaggaaggattgcttgaggccagaagtttgagaccagcctgggccacgtaggaagaccttgtctctacgcacaaacaaattagctgggcgtggtggcgtgcccctgtggtcccagctactcaggaggctgaggcaggaggatcgcttgagtccgggaggttgaggctgcagtaagctatgaccacgctgctgcactccaccctgggtgacagagtgagaccctgtctcaaaaaaaaaaaaaaaaaaaaaaaacaagtatgcttagtgtgagtgtgactcttgccacgtagaaagcaccagatgttatattttaatatggctcattcagtaaaacatccgcaggcccagagagtgccaggcctgtaggaatgacccaaccctggggaagcacagggaagaaggccactggggactctggggagaccagcctggcctccccggccccctgaggcccttccctgactccctgtccttagactgcatccaggtggatccccccgagcggccccctccgccccccagcgacgatctcaccctcttggaaagcagctccagttacaagaacctcacgctcaaattccacaagtactgcctgctcactcgaggggggcccagggtgggggaggcagcacactaggcactctcaccccagcaactacttccctaaggtggggacagggcccccccgcccgcgctggtgcctgctgggtgagcacttcccctgccagctgcagagtcagcacgtggcaggggacgctggcacttggggccggaagggacccgaagacgcccctgaccctcacccgagcctcctgcctaggctggtcaatgtcaccatccacttccggctgaagaccattaacctccagagcctcatcaataatgagatcccggactgctataccttcagcgtcctggtgaggccccccgggaacccacagggctcctgagttccagggcagggacctggtcagggagtgtcttgggagcactggccaagggcaagcgtgcgggtgatgagggagggagcccggggtctgtcaggccacctgtcatgtggaccttggggcttggggctgccaaggtttactctgcccccaactggcccccacagatcacgtttgacaacaaagcacacagtgggcggatccccatcagcctggagacccaggcccacatccaggagtgtaagcaccccagtgtcttccagcacggtgagcccctgagccccagaccagcactgaccaggggccctggcctgtcctgggattccccaagccccagatcagcgctgcctgggggccgtgacctccccaggaatccgctgagcctcagatcagcacagaccagggaccccgtcctgtgctgagatcccccaagccccagaccagcactgaccggggttcttgactcaccccaagcaagccctgagcccactgaccaaccaaaaccagccgtgcagccccctaggtctccagcctggcctggcaccaatgctagcctcccaaggctccatgccatccttggccctacccgctctgccctccccgcaggagacaacagcttccggctcctgtttgacgtggtggtcatcctcacctgctccctgtccttcctcctctgcgcccgctcactccttcgaggcttcctgctgcagaacgtgaggcttctgcgtcatgtgtgctggtgtcctccccgcctggccctggggcgataaaagccagggctttgagggtcctgtgcctggtcaggccctcaccccgcctgccttctgcaggagtttgtggggttcatgtggcggcagcggggacgggtcatcagcctgtgggagcggctggaatttgtcaatggctggtacatcctgctcgtcaccagcgatgtgctcaccatctcgggcaccatcatgaagatcggcatcgaggccaaggtgcgtcctgccaacaccctgggccccaggtcccatccctgctgtcagtgcctatccggggccatatcctcccccaggccccccaaaggaagggctgggccagataggttgacgcagctcccacccgcagaacttggcgagctacgacgtctgcagcatcctcctgggcacctcgacgctgctggtgtgggtgggcgtgatccgctacctgaccttcttccacaactacaatgtgagttttgcacatgcagctgggccttccacatggttactccacaccctccaaataaatccctacacacgcagccctcaccagccccggccaatggccccttgcaagcctcctcctcctacctgcccacaccagatatatctgtcactgcacctgcgcggggccccgggagcctgctcctttgtgcccacccagctgagtctagccgtgcgttgccctcggaccccctcagacgtggccacgccccctctaggcacccactggctcccatgaccacaccggctgtgccctcggcaaggccccgcccctcccacccccatctgggtgcccacagctgacctgagttgtggccacaccctcaacgaggctccctctgccccaacccagatcctcatcgccacactgcgggtggccctgcccagcgtcatgcgcttctgctgctgcgtggctgtcatctacctgggctactgcttctgtggctggatcgtgctggggccctatcatgtgaaggtacatctaacccctgatgtccctgacattgaccctgtgaccttgtcattgacactgtgacccccagatgaccccttggtgactgctgggagtctgtccactgtcccctgtggtccttggtgaccctgacactgaccctgtgccattattgttgtcacagttgttgatgaccctatttcgacctgaattactcccctcctgctctatctacccagaccctaggtcggccctgtggccctgtcattgacccgtggtcccggccattcacatgggaccccagcctgggacctggccattcacatagtgaccccagcctgggacccggccattcacgtgggaccccagcctgggtcccggccattcacgtgggaccccagcctgggacccggccattcacaggggccctagcctggaacccgaccattcacatggtgaccgcagcccgggacccggccattcatgtggggccccagccaccagctcctagccatttgcatgggaccccagcctgaccccagcccccggttcctggccatgccttggctccctctgaccccgccgcccctctggcagttccgctcactctccatggtgtctgagtgcctgttctcgctcatcaatggggacgacatgtttgtgacgttcgccgccatgcaggcgcagcagggccgcagcagcctggtgtggctcttctcccagctctacctttactccttcatcagcctcttcatctacatggtgctcagcctcttcatcgcgctcatcaccggcgcctacgacaccatcaaggtcagccgcatgcacccagccctgagctcgggctctgggtgccctggagtctgccatgagggggtcttggggacaccgcagggtgaacagagaagacccaggagagaatatgggagactctatgaaaccaaaaagagggtggttcagaactggggggcgcagggggatgtcaaggtgggcttgggccaggagggggcctgagtcagtctttgccaacagggcaaccgagtcatagagtttatttatttatttgtttatttgagacggagtcttgctctgtcacccagggtggagtgcagtggtgcgatcttgactcactgcaacctccacctcccgggttcaagcaattctgtctcagcctcctgagtagctgggactacaggcacacgccaccacgtccagctaatttttgtatttttagtagagatggcatttcaccgcattggtcaggctggtctcaaactcctggcctcaggagatctactgccttggcctcccaaagtgttgggattacaggcgtgagccaccacgcccggcctattttattttattattaaagtattgttctttattttattagagacaagggtctcactgtgttacccaggctggtttcaaactcctgaggtcaagtgatcctcccactttggcctcccaaagtgctgggattacaggcgtaagccaccacacccagcctattattattattttttttttgaaatggaatcttaccctgtggcccaggctggagtgcaatggcatgatctcggctcactgcaacctccaccttctgagttgaagcgatccttgtgcctcagcctcctgagtagctgggattacttgcacgtgccaccacacctggctaatttttgtatttttactagagatggggtttcaccacgttggccaggctggtctcgaactcctgacctcaggtgatccacctgccttggcctcccaaggtgctgggatttcaggcatgagccactgaacccagctaagtcatacagtttcaatgaccttgtcattgaccctgggacgttgccattaacatggtgatcctcagctggccccattcctatggcggacctctaaaaacccaaccctgaccccagcccccagccatgcccccgactccctctgaccctgcccaaggttagcttctttatttatttattttttttgagacggagtctcgctgtgtcacccaggctggagtgcagtggtgcaatctcggctcactgcaacctctgcctcccgggttcaagcgattctcctgcctcagcctactgagtagctgggattataggcacacgccaccatgcctggctaatttttgtatttttagtagagatggggtttcaccatgttgaccaggctggtctcaaactcctgaccttgtgatccgcccacctcaggctcccaaagtgctgggattacgggcgtgagccactgtgcccggcccaggttagcttctgagcagtaaaactgggctcaacccagggctgtctgattccagaagccgtgctcctaacccctctgtcctcagtttagtagggtggctgggaacagtggtttccctgcaagctgcaagggtcaggggacagagcaggatgcggaagtggcaggtagataggattctttcagcagatatatctaagggccaagatctgtgctgggttctgggcatggaggaaaatcaggtgtgcatgatccgtccaaggcctgtgggcaaggatggcacaggaacagacatcccatgaccaatgacctacttgtaacaggtatgaaggaagagtggaaggttgcagagggacccctgctttagattggtatgacaggagatccaggagagcttctagaatgttctatccatcactagtctctagccctatgcagctatttaaattttgattttaattccggctgggcacggtgactcacgcctgtaatcccagccctttgggaggccgagggggggtgggggtggatcacctgaggttaggagttcgagaccagcctggccaacatggcaaaaccccatctctactaaaaatacaaaaaattagcggacgtggtggcaggcacctgtaatcccagctactccggaggctgaggcagtagaattgcttgaacctgggacgtagaggttgcagtgagccgagatcaagccactgcactccaacgtgggcgagagaccgagactctgcttcaaagacaaaacaacaattttttaaaaattttaattcaaatgaagtacaattgcaaatttagcctctgacttgcaccatcctgtatccagtgctcaaaagccagtgtggctggtggctgccatattggacagcatagatattgaatacttccatcgcctctagactgaagagatgggagcccaggggcagtgcaccgaggggaaggaatagctaaagcaaaggtctagtagcctgaaaaaacttggagaaaagatggcccctccatgaggccgagtgagaggaaggaagccttggctgggaccctgccacatccaatgtcaccggcagatgggtacacccccttttccccatgcatggattcagctgtcccacagacacattgactcaggcccttggaactacttcctgtcttgccttagcacgtagacatcacacacatgcatccactcaggtgggcagtctcaggccctgctcccactgctgtgctcagcgtgcatccagctcactcaatagatggtttctgagcatcgaggtcatgtcagccctggctctaggtctgtaggtgctggacctacagcagaaggcaaagacacagactggcaaagacacagcttgtatccaggttcaggggtcagggaaggtccctctgtgcaagcaaactgtggaacaacgggtggagcaggcccagcaagtgcaaaggcccggaggtgggaagcgatgcagatatggctggaggggagggcggacttcaagggccttggaggttgggagccactttcaggctgagcctcccggcttctctccccagcatcccggcggcgcaggcgcagaggagagcgagctgcaggcctacatcgcacagtgccaggacagccccacctccggcaagttccgccgcgggagcggctcggcctgcagccttctctgctgctgcggaaggttcgagtcccgggtctggcacattcagattggaggttagggaatggggaaaggggagcgagccagagaaaactgacgcccctcttccctgcttccttcctccagggacccctcggaggagcattcgctgctggtgaattgattcgacctgactgccgttggaccgtaggccctggactgcagagacccccgcccccgaccccgcttatttatttgtagggtttgcttttaaggatcggctccctgtcgcgcccgaggagggcctggacctttcgtgtcggacccttgggggcggggagactgggtggggagggtgttgaataaaagggaaaataaatgtgtcgttttcatttttagcgggaggagcagtccttgcgttaagcggtgtgaggccctttaaggcgcggccacactcagcatggcggcctcagtcggccttccaagcatggcgcggggaggaggggtgggagggtcgggagggactgcggtgcgactaggagtgaataatttaaaggggccgtgcctgcggagccgggcggaacgctagcggtgttggcgcggagtggaccccggctgcggcccctgggtgagtctgggtttccgttagcctcgcaggggtgtcccttcgagggtcgttagcgagcctccgctttcccacgatctgtcctccgattcctgttaactctagactttctgatgttcccataccccccacgtctcggcaggtgtttccacaccggtagccagctgtgccctgaggtggaagaggaccggccacccaggaattttccaagtaacgactcggagtctccgggattcctatctcccggcccccgaatttccattaatattctagcgatgtcagaaacatcctcagcttcccagaaaaatcccagtaatattccagcatctctcagtatcttccaaggagcccggacgccctccccaggcccgctctcataagcaccccaggaatgtgcccacccacctcctggttttcccagcagtagtattgtaatcctcagaatctcagtaactttccagtgaccccgcatccccacccactaatcccagcgtctctggttacgcctcccagcaatggcgccaccatcggtcccggagtcccagtgatgctctgtgccatagagcccccataacttcactactacgtgatagtaaatccccggcaaaaaccagcagcgccttgcaagcccacgccaccccaagcatcccaggactcttctgaaacgtgggtatcagacgccttccgcggatgccccggcagtactcccgtgcctcccagctcctgggtcttccccggggcaggcttgcgtcgggagccgagtatctaggtgcccactcccggaccccacggtttgcgggcccgttttcctggggtggggcattcagtcttcgacggagtagggggtgcggcctggggggtggggtggtcaggcttgatcaaccctgcagagggcagtgacccgggaggaagtcaccaggtgcagaggaccgtgccctgtggggacctgcctgcaggctgctgacagtgggtaccaggtcggcctttggccccggggtggggttggacaggcgggcgtctggtaggccctacgcgtaggcgaagggagcaggaagccggggacccgcctcatctcctggccagggccgagaggtcggtttgctccatcccttagtcccgcagcgcccctctagcctcgcccctggcagctggagacgcttcccccgccaccccagagggcagggcttgagctgggggcagggcttgaggcaggggagaggtgggcccagattgacgacttgcacgggttccttcgactccttgatttcccaggactccgggctaccagatcggccgtccagctggaatcaaccgatggaggctccgctgcaaactggaatggtaaggggtggggcggagaccgggtaggtgccggcgtggggcgccaagaggactacaactcccggcgtgctcagcgcgcattacgtggtctggcgataacgcgctgcgtccgctcgggcggaactacgtttcccggcatgcactgcgggccgccgggcctcagggaagagtcgcgcccccggggagggagcagcactggcccattctgcagatggggacatcgagtcacgggctggctacgaactcctcgggggcgaaggtggcggagagggatgggttccaggacgtcctggcgcccggggaaggctcggcgggacggatttgcggtgcgcagccagtgccgttcgtccctcaggtgcttggcgtgatgatcggggccggagtggcggtggtggtcacggccgtgctcatcctcctggtggtgcggaggctgcgagtgccaagtgagcacccgaggggcccctcttgggaggctgtatggtggggggcccaaatgcccgggtcccgaggcggcagagatggggatttgctggcgtctgttcgcggtaccccagctctggcagggtggagtctgcacagagctcggagtgcccctgtccccacctatccccagaaaccccagccccggatggcccccggtatcggttccggaagagggacaaagtgctcttctatggccggaagattatgcggaaggtgagtccgggacccctggggtccgccctgaccacacagaggccgcgccccttccctatttacacttcttagtgtccgccaccgctccttccttgatggagaccccctggatccgtctgcctcttctccaaggtctgaattagcaattcacccatctccgccttcattctcccaggtgtcacaatccacctcctccctcgtggatacctctgtctccgccacctcccggccacgcatgaggaagaaactgaagatgctcaacattgccaagaagtaaggctgtgctgggtgtgacctggtattaggggttatctcaggggccttttgagtaatcagcttacaccaaagtgttgtggaagtcttcccatattggctgcgcgctgtggctcatgcctgtaattcccagcactttgggaggctaaggcgggcagatcacctgagatcaggagtttgaggccagcctggccaacatggcaaacctcatctgtactaaaaatacaaaaattagctgggcgtggtggcatgggcctgtaatcccagctactcagaagggtgagacaggagaatcacttgaatctgggaggtggaggttgcagtgagctgagatcatgccactgcactccagcctgggcaatagagtgagactctgtctcaaaaaaaaaaaaaaaaaaaaaaaaaagaagaagaagaagaagaaagtcttcctgtttcagagagacatctctggactctcctctcagagctcttccacaccagacatgctgtctctagggtatctcttccctgagggctacctcagtgaccttctccttccactggagtatctgagctatttgttcccaagtcaatatctcagaggtcttgccatatacttagtgggggggtctacatcaggggtttccatgtaggttatttcatgagtctcttcacatgagtggttttcttccagggtacctcactgaggtaattgtgtttctacgatctcctaaaggggctatctccagcctccagcctctcttctccgggggttatctcaggcatctctgtacatcagaaggcatctttcctatgttatggaccttgaagttcttcccacactaaggaggctgtctcaggagtttctgttccctaggggctatcttatgaattttcttgcactagaaatataggaaggatgcatcagagatccctgttggcagcaaggtctgcgagaaaggctctccaactctctttgcaagttgggtgctggctctgggatccctgtgcgtcatgtagtctacctggaggtctgcctcaagggtttcttcacaccagggcagggctctccatgatcaatagtcctgcaatggcagtcctttcttttttgtttgtttgtttgtttgtttttgagatggagtcttgctctgtcactaggctagagtgcactggcacgatctcggctcactgcaacctccacctcctcggttcaaaagattctcctgcctcagcctcccgagtagctgggactacaggctcataccaccatgcccagctaatttttgcatttttagtagagacggggtttcaccatgttggccaggatggtctcgatctcttgaccttgtgatccgtccgcctcggcctcctaaagtgctgggattacaggcatgagcgactgagcccggccaatggcagggctttctgtgagttgagtagaaggactatctcaaagttccccatgatcagttgagggtctatacctcaggtttctccacatcacaggagctgtctgtagtgtttgcacactcttaagggactaccctgatatcttcatgattgtcagagggctgtctgagctttctgtgacctagggaagagttagcccaagatctccctgatcaaaaaaggaataatcataacaattataattattattattattttggagacaggatcacactttgttgttgaggctagagtgcagtggcacaatcacagctcactgcagcctttacctcctgggctcaagagatctctcctgcctcagcctcttaagtagctgagaccatgggcatgcaccaccatgcctggctaatttttaaatttttttgtagagatgggagtctcactgtgttgcctgggctagtcttgaactcctggcctcaagcaatcctcccacctcggcctcccaaagtgctggtattacaggcatgagccaccacgcccagccaaaaaaggaattatatctgaatttcttgatttcactgagtttaactcagggtcccatcctccaaggtctatctcagggatcttttgccagcggagggtctttctcagcaatcactgtgacttgtggggaagggctctcccaggtccacgattagcagaggggctatctggattctccacttataatgagggctacttcagggacctctgtggctgtcagaggggctgtctcaaggttctctgagactgggaggaaggtctatctcaggaatgtttatgtagaacagagagactgtatctgcggtcttctcatatattggaagctatgtcaaaggcatactcacgttaaggggactatctcaggaatctactctgtgactactggaaggaccgtttcaggacccccatgataaacacaggtaccatttctgggcctacccttatcttggaagctatgtcaggggtctgccttcctaaagggttcagctcaggggcctatgcctagtggaggggccatctcagagaactttaggtctggggtcatagggtttttccataaagggccagatagtaaatgtttcaggctttgctggccacatatggtccccattgcaactcttcaactctgctgcatgggagcagccataatgatatgcaaatacatgaatgtggctttgtaccaataaaactttatttaccaaaataaatgtggccagccgggtgcagtggctcacgcctgtaatcctagcactttgggaggctgaggcgggaggatcacttgagttcaggagtttgagaccagcctggccaacatggggaaacctcatctctactaaaaatacaaaaaattagctgggcgtggtggcacccacctgtagtcccagctacttgggaggccgaggcaggagaatcgctttagcctgggaggtggaggttgcagtgggccgagatttcgccactgcactccagcctgggtaaaagagcgagactcctgaggcagggcacagtggctcacacctttaatcccagcctttgggaggccgagtcgggcggatcacctgaggtcaggagttcgagaccagcctgcccaacatggagaaaccccatctctactaaaaatgcaaaattagctgggcgtggtggcacatgcctgtaatcccagctactagggaggctgaggcaggagaatcgcttgaaccctggaggtggaggttgcagtgagccgagatcgcaccattgcactccagcctgggaaacaagagcaaaacttcgtctcaaaaaaaaaaaaaaaaaaaaaaaggtggccagcctgatttggccagcgggccagagtttgctgtacatgagccctggggaaaggggtatgcgggggtcttaggtttgcctgagccttctccgtgcccccctcacccccggcacccctcccctcccaccaggatcctgcgcatccagaaagagacgcccacgctgcagcggaaggagcccccgcccgcagtgctagaagctgacctgaccgagggcgacctggctaactcccatctgccctctgaagtgctttatatgctcaagaacgtccggtcagtgttggggtgcaggtgggggtggagggctgcagacgtggggccgccctgacctccagcctctgtcgcccaccgcctgtccaacagggtgctgggccacttcgagaagccactcttcctggagctctgccgccacatggtcttccagcggctgggccagggtgactacgtcttccggccgggccagccagatgccagcatctacgtggtgcaggacgggctgctggagctctgtctgccagggcctgtgagtgggcctccccaggggctgctgcaggaggatgggtggtggggatgggcagcaggcattggtctgtagagctggtggtctttggagatgcgtcatcgggagtcaggggaacgggtgaccgaggacatttggggtagtctgcgtagttgctcagtagttacaagtattgaacgatgggagatgcctgctcgttggaagggttggtgggttcccctgagaagggatgagaagtgtcagtgatcattgggatggatgagggggcgacatgccagtcaccagggcgaggccactgagggtccacggtctcctgtgtctcaggacgggaaggagtgtgtggtgaaggaagtggttcctggggacagcgtcaacagccttctcagcatcctggatgtcatcaccgtgagtgaccagtttctgaggcaggggggctggggtgcaaggtcccacccaagggactaggttgaaggaaatcacagggtccccaatctctggttcatccgttatgctgccgatggcccctcacgggactggcgccaggaaggattaggggagtagcgagggggactcgcagcctctgcccttgtctctcttcacgccctcccctcccccagggtcaccagcatccccagcggaccgtgtctgcccgggcggcccgggactccacggtgctgcgcctgccggtggaagcattctccgcggtcttcaccaagtacccggagagcttggtgcgggtcgtgcaggtcagtgggccttcgcctcctgtcaccccctgagggaccccaccctggcccccacccattccaggctccaagggaccgaggcccagcagccagcaggcgctggagctgtggttatcggcctggagcagccagatgtctgcagccgcggactcctcccttagctgcctcgccccatttccccagactgtgggtctctccctggttcccgcccgaccccttatgctgcgaactagcccggcccaccatctggccctgccccttaccccgccccatcttatggccacgcccctcgagccctgcagatcatcatggtgcggctgcagcgagtcaccttcctggcactgcacaactacctgggtctgaccaatgagctcttcagccacgtgagtgggtggcggggagcgagcacaggggggatgggggcgaggtctccctcccaggacaggccacaagctgttctctgcccccaggagatccagcccctgcgtctgttccccagccccggcctcccaactcgcaccagccctgtgcggggctccaagagaatggtcagcacctcagctacagacgagcccagggagaccccagggcggccacccgatcccaccggggccccgctgcctggacctacaggtacccagggacccgaggccagccgagcccaatctcccaggaagccccgtctcagccgccagcccctttttcagttctgcatagagtcaacctgaccttgtccagccccacagggactccatagcggggtacccaggtctgactcctatctggtaccgaggaagctgtggcctcgtccccaagggcccattggaattgctttaactagttaatcagtcgccagcatctccttatctcccaacctgctaatcctcctagtggctctgaggggcaggagcctgaacatgtgtctcccccaggggaccctgtgaagcccacatccctggaaaccccctcggcccctctgctgagccgctgcgtctccatgccaggggacatctcaggtttggagcactgggtctgcggggagggccatggagcttccaggtttgaatccaggtccaccgcctgcctgtcttgattgttttaatctgcgaaatgggaacactgccagtacttccccaggcactgttttgtagatattcattgagatagtgcttctcccacctgttaagagggattcagagggagagtgcaggcgttgattagtcatgtctgctacagcagtggcccatggcacattggtatccattggtctcagactgcaactgtggttactctcatctttttcttttcttttgagacctgtctcccaggctagagtgcagtggtgctgtcatagctcactgcagcctcgaactcctatgctcaagtgatcctccagccccagcctcccaaatagctggaactacaggcctgcaccactacacctggctcattttttaaaaatcttactctcatctttatggtttttgttgcccccctgcctgcctgcaggcttgcagggtggcccccgctccgacttcgacatggcctatgagcgtggccggatctccgtgtccctgcaggaagaggcctccggggggtccctggcagcccccgctcgggtaaggcttgggaccctgcccggtggtggagcccgcaggggaaggtggctgggagggagcatcaggaggtcacaagcctgccccactcagacccccactcaggagcctcgtgagcagccggcaggcgcctgtgaatacagctactgtgaggatgagtcggccactggtggctgccctttcgggccctaccagggccgccagaccagcagcatcttcgaggcagcaaagcaggagctggccaagctgatgcggattgaggtgggcagccgaggggagctgggcacagggcgcaagggaggcctggctgcgcccatctcaacccccctacctccccaggacccctccctcctgaacagcagagtcttgctgcaccacgccaaagctggcaccatcattgcccgccagggagaccaggtgaggctgacccctgacctgtaaccatgccacctgagatcattccctatgacttctgtgacctctgatccctgccctttgactgtaagaccagcaccttctcccatagaagcagacctctctcatcctatcatttccaacctctaacccttgggtcctgtgacccccaccccctaaccccaccctatgtcctctggacctgtcaacccttcacctgtgacccctgaaccttttgccctaggactccaactcctagatctctcctgcctgccctggctcttcctgtaattctgttttctgaacttctgatcctgcagtattcactaacatgtctgcttctcatgctgaccgctgccaggataggggctcaataaatggctacaaatcgccatctggcctcggaaggccatgaaccagccctgggtcggggtttcagggccttgtggcggcacccaggatgtgtaggaaaatgtatcctaccattctgtccactgtccatatggggaaactgaggcccatcaagggttagtgacccgactaccagctgaaagtcaggaagcctcagggtaggaggaggaggaggaagaagaagaggaaagttgaaacccacactctgtccccagagtgtggcagatgatctagaaagttctctgcttcctcatcagtggaatgaggtaataaagaagagatgcctagttcgcagaaccccagtaagacttcttttttttctttttttttttttttgagacggagtctcgctctgtcacccaggctggagtgctgcagtggcgtgacggtggctcactgcaagctccgcctcccgggttcacgccattctcctgcctcagcctcccgagtagctgggactacaggcgcctgccaccatgcccggctaattttttgtatttttactagagagggggtttcactgtgttagccagggtggtctcgatctcctgacctcgtgatccgcccgcctaggccttccaaagtgctgggattacaggcgtgagccactgcgcccggcctttttttttttgttttgagacagagtcttgctgttgtcacccaggctggagtgcagtggcacaatctcagctcactgcaacctccgcctcctgggttcaagcaattctcctgcctcagcctcccgagtagctgggattacagggttgtgccaccacgcctggctactttttatatttttagtagagatggggttttgccatgttggccagccttgtctcaaactcctgacctcaggtgatccgcctgcctcggcctcccaaagagctgggattacaggcatgaaccactgtgcccagcctactgagacatttttgattgttaggatttcacagggtgctgttcctgacacctgatgggtagagatcagggatgctcaaatgtacagagcagcaggccggaaccatacagtccattatccacagtgtggggtttgcaagagtgacaagtggtcagggagggtgtttagcagcagcttatagggagcgggggcttgaggtgacagtgagctgtcataggcactgggaccccagctctgccccaggcttgggggagagaagcctggggcagggttggggtggggtgggagctgtggtcccactgttagccggctggagtgttgctgtgtcacttgacccagtgactctgctgtccccttgaaccacccatggcagggatgggctcttttctggagaggaagtcaaggcttttgccagctgttcttagaatagctgaggaagtaaggttaccctgtggcttctttgggggcccctgggccctgcttatctgggagactgctggccacaacccagccctggcctgtcagtgtaccacgctggtctgcagcccctcagagcttctctgcgttggcaggacttttgttagggaccctgtgctctcctgtgcttctccttgaaactttttttttttttcggagacggagtcttgctctgtcgcccaggctggagcgcagcggtgcgatcttggctcactgcaacctctgcctcccggattcaagtgattctcccacctcagcctccctcgaagctgggactacagtcacgtgccaccacgcctggctaatttttgtagttgcactagagatggggtttcaccatgtcggccaggctggtctcaaactcctggcctcaagtgatccactcgcctcagcctcccaaagtgctgggattacaggcgtgatcctcggcacctggccacagtctggaaattctgtcttagaaggttccagcatgtgtttatatctcctgggactgtgcctcacccaggggtccctgcagtgttttggcaggtggagcttcactgggtaccagacaggttggtgtggtggataaagaaggaatctctccatttctgggcggtttcagttccttatttataaagggatggaacaggaaggtttctagctggtcaggctacccaaagaagaaagaaacgtgtttacccagcatttgccccatctcgaactgtgtgctgctggctggacaagaggcaggaaaatggctgggcacggtggctcacgcctgtaatcccagcaccttgggaggccgaggtgagaggatcacttgaggtcaggagttcgagaccatcctggccaacatggtgaaaccccatttctactaaaaattcaaaaattagtcaggcacgatggcgggcgcctctagtcccagctactcgggagcctgaggcaggagaatcacttgaacccaggagacaggttgcagtgagctgagatcgcacccctgcactccagcctgtgcaacagagtgagaccctgtctcaaaaaaaaaaaaaaaaaaaaagtgggcagggaaaacccttagtggtccctgcccttgggcagcccaccgtattctgagagacatgactcaaaggattacacaaattcttgtaaaatcataagtgcttagtgtcacaaaggaaatgatcttggcactacaaagtctggcttagacagggtggcacctctaagggcatgacctaagaaggaaggagggggaggaacaaactgggtgcaggtgggaggaaaggtcattctaggcagaaggaagagcttgtgcaaatgttgtgtggtgggaagaaataggttgatctctaagaaataaaaaaggaagtcagtgggcctcaagtgaaacaatattttttgggggggtgtaatggttttattgagctataattcatgtactatacaatttacccatttaaagtatatactttaggctgggcacagtggctcacgcctgtaatcccagcactttggaaggccgcggcgggaggatctcttgagtccaggagttcgagaccagcctgggcatcatggcaaaacccagtctctacaaaaaacaaacaaaaaaaattagccaggcatggtggcgcatgcctgtagtcccagctacacgggaagctgaggcaggcataagccactgcacctggccatgcccacctaatttttgtatttgtagtagagacagggtttcgccatgttggccaggatggtcttgaactcctgacctgaggtgatccgcctgcctcaccctcctaaagtgctggaattacaggcatgagccactgcacccggccttatgtaagggcttctgtgtagacatatattttatttatttttttaaaggtggggtctcactatgtttcccaggctggtcttaaactcctgggctcaagtgatcctcccaccttggcctcccaaagtgcttggacatatgttttcatttctcttgggtatatacctaggagttgaattgctgggttataagccaattcaattttttttttttttaagagggagtctcgctatgtcgcccaggctggagtgcagtggcgcgatctcagctcactgcaacctctgcctcctaggttcaagcagttctcctgtctcagcctcctgagtagctgggattacaggcacacgctgccacgcccagctaatttttgtatttttagtagaaacacggtttcaccatattggtcaggctggtcttgaactcctgacctcaagtgatccatccacctcagcttcccaaagtgctgggattacagatgtgagccaccatggccagcctctatttttaatttttttaagcactgtgtgtttgtttgtttctttgctagactgttttccaaagcagcggcaccattttacatttccactgacagtgtatgtgaattccagtctctctacattctctctaaccctttgtaattctagccatctttgtgggtgtgaagtgtagtatgtcattgtggttttgctttgcatttctctaatgacttgacgttgaacagctttttatgtgcctattggccatttgtatatcttctttggagaagtttttattcagatcttttgcccattttactcttactttttttagagacgggggtctcactatgttgcccaggctggtctccaactcctgggctgaaactatcaagcgatccttctgccttggcctcccaaaatgctgggattgcaggcgtgagccaccgcacttggcctttaatttattttagagacggggtcttgcactgtagcctaggctggagtgtagtgacgctatcatagctcactgcaacctcaaacatctaggctcaagcaatcctcctgcctcagcctccagagtagccaggactatagacacatgctaccatgcctggctaattaaaaattttttttttttttttttttttttttttttttgtagagacagggtttcactatgttgcccaggctggtcttgaactcctgggctcaagcgatcttcacacctaggcctctcaaagttctgggattacagttgtgggccaccacacccagccccttcagtatactttaaatcaggggtgtccaatcttttggcttccctgggccacattggaagaattgtcttggaccacacataaaatacactaacagttatagctgggcatagtggcacacacctgtaatcccagcactttgagaggccaaggcggttggatcactgaggtcaggagttcaagaccagcctggccaacatggtgaaaccccgtctctactaaaaatacaaaaattagccaggcgtgtggcaggcacctttaatctcagctacttgggaggctgaggcaggagaatcacttgaactctggaggcagaggttgcagtgagccgagtttgtatcactgcactccagcctgggcaacagagcaagacaccgtctcaaaaccaacaaaccaaaaaaccccactaaagatagctgatgagctaaaagaaaaaaaatcgcaaaaaaaaaaaaaaaatctcataatgttttaacaaagtttatgaatttgtgttgggccaaattcgaagccatcctgggccacgtgcagcccgtgggcagcagggtggacaagcttgctttaaatcatctcgagattacttataatacctaatacaatgtaaatgctatgtaaatagtcattatactgtattatttagggaaaaacggggaaaatagtctgtaaatggtctgcgcaggtgcaatttttttttcctgaatattttagatccaaggttggttgaatcctgggtatatggaacatatatatatatatacacacacatatatatacacacatatatatatagagagagagatgctgctcatctatatataatctatgtaaaaaaatttttctttttttttttttttttttgagacggagtctcgctcagtcgcccaggctggagtgcagtggcgcgatctcggctcactgcaagctcctcctcccgggttcacgccattttcctgcctcagactcccaagtagctgggactacaggcgcccgccaccacgcctggctaattttttgtacttttagtagagacgtggtttcaccgtgttagccaggatggtctcgatctcctgacctcgtgatccgcctgcctcaggcctcccaaagtgttgggattacaggcatgagccatcgcgcccggctaaaaaatatttttatatttatttatatttatatatagatggtgcttatatccaaagtctttattctctccttcatgtttcttttttttctttttttttttttgagacggagtctcgctctgtcgcccacgctggagtgcagtggcgcgatcttggctcattgcaagctccgcctcccggtttcacgccattctcctgcctcagcctcccaagtagctgggactacaggcgcccgccaccacacccggctaattttttgtattttcagtagagacggggtttcactgtattagccaggatggtctcgatctcctgacctcttgatccgcctgcctcggcctcccaaagttctgggattacaggcgtgagccaccgcgcctggccttcttcttctttttttttttaaagacagtgtctcactctgtcgcccaggctggagtgcaatggcatgatctcagctcactgcaacctcagccttccaggttcaggcaattctcttgcctcagcttcctgagtagctggaattacagacatgtgccacgacgcccagctaatttttttattttagtagagacaggtttcgccacgttggccaggctggtgccgaactcctggcctcaagtgatcccccctgcctggcctcccaaagcgctgggattacagccgtgagccaccgcgccctgcgccttcatatttttcttaacccttcctttcttctttaattttttcctgtgggggcatgttgacctgagctggggtccacgctgtccgggttctgtgttcatcacatcccctgcccgcacaggacgtgagcctgcacttcgtgctctggggctgcctgcacgtgtaccagcgcatgatcgacaaggcggaggacgtgtgcctgttcgtagcgcagcccggggaactggtggggcagctggcggtgctcactggcgaacctctcatcttcacactgcgagcccaacgcgactgcaccttcctgcggatctccaagtccgacttctatgagtatgacagcccgaagttggagtgtgggtggcactcggaggaccccaacccgtgggagtggccagaaccccatccctcaacctcactcctggaagagcagaagggagcccccagatctggcctcccagcgccggtgtaggacggttttgaggccttcctctttcatcccaagtctgttcctgcaggatcatgcgcgcacagcccagtgtggtgctgagtgcggcgcacacggtggcagccaggatgtcgcccttcgtgcgccagatggacttcgccatcgactggactgcagtggaggcgggacgcgcgctgtacaggtgcagctcccaccgcgctgctcaggcccggcctaggggtggggacctgggggtggtcagaccttgctgacctccacgcccactcaggcagggcgaccgctccgactgcacttacatcgtgctcaatgggcggctgcgtagcgtgatccagcgaggcagtggcaagaaggagctggtgggcgagtacggccgcggcgacctcatcggcgtggtgagcgcgacccccacccactgacctctggccttttccaggccagtccctcgacaactcacacacatcatcccgggtaatccagggagtggtgaatgcagctcccgacctctgaggtcacccagtccactccccgcccagacctcatttcgttggaaaaaggggattccgcctgtcgtggatccctgtcctctccctctccccagagctctaatgggtagcgagcgaggcttgcttccctacacccccattgcaggggagccctagatggggcagtacagccccctttccacccatcttcggcctcctcattccccacccaagcagccccaatcatgcacgcggccccccaggtggaggcactgacccggcagccgcgagccacgacggtgcacgcggtgcgcgacacggagctggccaagcttcccgagggcaccttgggtcacatcaaacgccggtacccgcaggtgcggcctgttgtgggcggggcagagaggcggaggcgggactccgggggggtgggggccgggcctagtgtgtgggcggggcttacagaggggcggggtcgagggaggggccgaagcgagagagtgagggcgggggctctcgggggtgggacccaggtaacgggcacccaggagccccggcataggagggagaggtgggacctggacagccgcttcccaggtctcactgaaatgccggcctccaacgcccccaggtcgtgacccgccttatccacctactgagccagaaaattctagggaatttgcagcagctgcaaggacccttcccaggtgagagccggccggcccagagcgtgctgggagatgtagtccggcgtccagagcatgctgggagggaagccttctttcctgagggatgctgggaaatggagttccgcgaagaaatcgtgcccctgagggtttcaaaccctaagtaggacccaggtgcagagcattctggggaatggagttcgtgttcctgagcatgctgggaaacgaagtcctcgacccctggcgtgctagttaatgggctcgaaagtaaatcagtggtgccggggagggagtcttaggcggtggacttggcgtagtctgcccgggagtcagggcttgctggggaagtccacggcctggacgttgagagaaagggagtcctagatcagaatatgatggcagggccgtcatggtggctcatgcctgtaatctcagcactttgggaggctgaggcaggaggatcgcttgagcccaggagattgagtttgaaaccagcctgggcaacatagtaggacccccgtctctacaaaaatttcaaacattagctgggcttggtgacacatgcctgtagtctcagccactcaggaggctgaggcgggaggattgattgcttgagcccggaggtcgaggctgcagtgagccgtgatcgtgccactgtactccagccgggatgacagagctagaacctgtttcagaaaaaataaaacagcaaacaaacaaaactccccataccatgatggaaaatagtctgtggattgttgtttaggactctgggcacctcgccttctgaagttacagcttgctgggagatgtagccccctgtttcagcctgtggcttcagtgagctagaacagaatggggcgtgcggtggggttggaggcctgctgaaatgagggcctgagtttctacattgtggtggccagattctgggccagcccagcaacctagataccccttttccctccaggggttctacccaattggccctgagccctagatcccccaaggcgggggcagggcggtagtggcagaaaagacatcattaagaaattacagaggcctggggcggtgggtcacgcctgtaatctcagcactttgtgaggctgaggcaggtgaatcacttgaggtcaggggttcgagaccagcctggccaacgtggtgaaactcatctctactaaaagtacaaaaattagtcgggtgtggtggtgggtgcctgtaatcccagctacttggacggctgaggcaggagaatcgcttgaaccggggaggcagaggttgcagtgagccgagcctacgccattgcactccagcctgggcaaccagagcaaaactccatctcaaaaaaaaaaaaagaaagaaaaaaaaaaagaaaagaaaaggaaagaaattacagatagagaatacaatatctagaagacaaaagagggtcatcttgccgtgtggctgaaagagggagggaggaagggagggagaaagaggcttttctaaggacagtgagctgagacttgacaactaagatggggccagacatgaaagagaaaccaggggtgctgcacaggaggctggtggttttgaagcactgaggaggaaagcgatcaaggggagaggtgatgggggttggggggtaagtcacataggggctaggggctgtggacaggcacttgagcttatttagattgttattgttagattggggaggaaggattccaccagtaaggaggcaacaagaggtctaggcaagatatgggagttgacagctggtctaggctgttagtggagaaactgggaagcaacagctgggtcaaaagtagcttttcttttcttgtctttgtcttttcttttattttctttttaagacagggtctcgctctgtagcccaggctggagtgcagtggcacgatctcggctcactgcaacctctgcctcccaggttcaagtgattctcctgcctcagcctcccaagtagctgggattacaggtgtatgccaccatgcctggctaattgttgtgtatttttagtagagcagtgtttctccatgttggctaggctaaaaatagctttatttctgcctcgttttatgttcaggtcccccattagacagaggaaccaaggccagaatgaggcaggggcactggccaattgatctcccaagcacagtgaatctgaatggttgtagagttgtgtaatggatcccactgaggtgatcagggcccaaagtggagggtagatggccaggttttaacaaaagagggaatagtagttgaggctgagggtccaggaccagagccatggctttctgtatggtagagtcaagactttgggcaactgggggctgcagtctgggagcacaggagcaagaatttcagataaggaggaagaggaagaagaggaggaggagggttcatctctctggacacaggttcgcaccacaaatctcatccattgggttcttagcaggctctgggttgggtgtgcccccacactcggaactcaccaacccagccagcaacctggcaactgtggcaatcctgcctgtgtgtgctgaggtccccatggtggccttcacgctggagctgcagcacgccctgcaggccatcggtcagtggggtgagggtcatgggtgggggctggcggtgggtgggacattagtgagtgagagatgttagggtaggtcatttggggggtggaggggaacagggccacaggggcggggtaatgggtattcttttctgagttaggccccagccctgtggaccatggttcccagcctcccttccccacctacccctaggtccgacgctactccttaacagtgacatcatccgggcacgcctgggggcctccgcactggataggtgtgtgttgcagaagggagtggggagggtggtgggtgggcctggagcctcaaattctttcagacctgagttcaagttcttggcttccaaccacggagcctgcgtcttacccataggtcaatggggagattcgcagtggtgtgaatctgcccaccggagcacggacttccgtggtgggggtttgggtgtctaagttcctcccagcaacggagctatgtggtctcggggagcacactgaccccaggccaaccccaggatgacgctgcccccttcccaccctagcatccaagagttccggctgtcagggtggctggcccagcaggaggatgcacaccgtatcgtactctaccagacggacgcctcgctgacgccctggaccgtgcgctgcctgcgacaggccgactgcatcctcattgtgggcctgggggaccaggagcctaccctcggccaggtcggaagcccgtgccccctgatctcacccacctcgggtcccgtcctttgccctcccgtgcctgcaccaggccacgtgcaccctcgccatgggggtaggcgatcagggacccaggtgtggccaggtggtggtggggcggctggtgacctcagccgtccgtattccgcagctggagcagatgctggagaacacggctgtgcgcgcccttaagcagctagtcctgctccaccgagaggagggcgcgggccccacgcgcaccgtggagtggctaaatatgcgcagctggtgctcggggcacctgcacctgcgctgtccgcgccgcctcttttcgcgccgcagccctgccaagctggtgaggagcgggccggcccccaccttctaggggcgtggctggtgggcgaggcttgggagactggggcggggcctgggagggctgaggacaggctcgaaggtcagggtacccctgggggatccgccggaccccgccctcatgctcctgggtcgcgactatctcccccatcccagcatgagctctacgagaaggttttctccaggcgcgcggaccggcacagcgacttctcccgcttggcgagggtgctcacggggaacaccattgcccttgtgctaggcgggggcggggccaggtgagggcggggcttgctctctgggggcggggcctggatgtccgagggtggagcttcctgggagaaaccgtgggggcggggcctgggtgttcgagggtggagcttcccctccgggagagaccccgtgggtaggggcgggtcctttgttccttagcagtgcgggaggtgggaggaggtaggggcaggggagttcctgcaggtggggcctagcgggtcactggggcccattttcccggcaggggctgctcgcacatcggagtactaaaggcattagaggaggcgggggtccccgtggacctggtgggcggcacgtccattggctctttcatcggagcgttgtacgcggaggagcgcagcgccagccgcacgaagcagcgggcccgggagtgggccaaggtgtgtgttgcgaggagggattgctgcaccccaggagtgccataaaacccgtggttccaacctaacctgatcccatgggggagcctccggggtcagggtgacccttcctgattaaatctatgatccccagctgtccggacttttatagataagcttctaggactctgggtaaccactttgggacctcctgtctactgaccctaacccataacccccaacgagagcacccagggcccttggtgaccaccttgtggatggccttggatgaccacatcatccctaagtgttcctttttttttttttttttttttttttttgagactgagtcttgctctgtcgcccaggctggagtgcagtggcacaatctcggctcactgcaacctccacctcccaggttcaagtgatttatccgcctcagcctcatgagtagctgggattacaggcacgccccaccagcccggcaaatttttttgtattttagtagagatggggtttcaccatgttggctaggctgcttttgaactcctggcctcaagtgatctgcccgccttggcctccaaagtgctgggattaccagtgtgagccgctgcacctggcccctaagtgctgcttgctcaccccctattgatgaaccttatctgtgaccccatgtaactcctatttgaccctgtctggccccttgtccctagagcatgacttcggtgctggaacctgtgttggacctcacgtacccagtcacctccatgttcactgggtctgcctttaaccgcagcatccatcgggtcttccaggataagcagattgaggtaggcccacctcatcccctgccctgcctacccctccccggaggagccccctgctcctcccccacctcgatccctgtccccgcaggacctgtggctgccttacttcaacgtgaccacagatatcaccgcctcagccatgcgagtccacaaagatggtgggtgtccccgcccagcctgcagcaaccgctgacgccacgtggggttggggggatgcttccgggagggccgctgagcttctgggacgttgttaacacgagtgaccgtccaccctggcccgatcaccgaccactaaccgccacccactaatgccccggagaccccaggtacgtccgtccttgggggaggggagcagggagactcgtcggacgccttacccccctcacgccatccccgcaggctgtgtgtggcgttacgtccgggccagcgcctcctactgcccctacctgcccccactgtgcgaccccaaggacgggcacctgctggtggacgggtgctacgttaacaacgtcccaggtcagcgagcccatcgggccggctgggcctccggcgtgtctgagcgtgtctgtgcgtgtttgtgtctgtgtgtcccaccgcgcaggctccctgtggcggtacgtgcgcgccagcatgacgctgtcgggctacctgcccccgctgtgcgaccccaaggacgggcacctactcatggatggcggctacatcaacaatctgccaggcaagtggccgcccgcaccacccgcacacgcaagcacctcccgcaccacacacacgcacacgcgtgggcacacacagacaggctcgatgacgggacacatgcccaagctgcccatgcaggggtgcagacacacatgcgcacacatacgatcacttgcacaaaatgatacatgaatgtgcctgtggacagcgacatgtgcagttgagatctacattctggccaggcgcggtggctcagcctggaatcccagcactttgggaggcctgaggtgggtggatcacctgaggtcaggagtttgagacccgcctggccaacatggtgaaaccccgtctctactaaaaatacaaaaaattaaccaggctggtggggtgtgcctgtaatcccagctactcaggaggctgaggcagataaatcacttgaacctgggagttggaggttgcagtgagctgagatcatgctactgcactccagcctgggcgacagagcaagactcagtctcaaaaaaaaaaaaaaagaaagaaagaaatctacatctacctgctggcgtgctgtgttaagcacaagtggatgtacgtacaagagggacaggtgcacacgtccacacacacatcaggggacatgcaggtggaatgcaacactcgtgtgcacaccagctatatatgcacatgctttctctcaggggcaggtagggcttacacacacgtgtacacacaggcacatgtgcacagatgaacacgtgtgtcagtgaaatagggcatttgccaacgcatgccagtctgtcccgtttgtcctgcacgttccctcaaacacgcagggatgtgcacacacgtagataggatgcggcacctctgaccgagttaagtcatgcctaccacctttatgggtgcaggtgagaagcgggcaggtacacaacttaaaatctcacaccccagaagtgtgcatatatgaacagacatgtacgccaactgcacacatgctcacaatcttgtaggccaggggtgggcaaactatggcccacaggctgagtcctgccctctgtttgattgtataaataaagctttattgagctgggcacagtggctcatgcctgtaatcccagcactttgggaggctgaggcgggtggatcacttgaggtcaggaattcgaggccagcctggccaacatggtgaaacccggtttctactaaaaatacaaaaattagctgggcgtggtggtgtatgcctctaatcccagctacttgagaggctgaggcaagagagttgcttgaacccgggaggtggaggttgcatcgagcccagatcgtgccattgcactccagcctgggcgacagagtgagactctgtctcagaaaataaaacaaaacctcccaacacctgacccccctcctcaacttcagttgcatcatttgcacgtctgtgcatgacagcatggtgtttgcatgtgtgggtattctctcttttttttttgcgtgatcatttgcatgatggcatctgtgggactgggttgaacatctctgccccgggcccccgaggggagcagcccgctgacccccctggccccacagcggacatcgcccgcagcatgggtgccaaaacggtcatcgccattgacgtggggagccaggatgagacggacctcagcacctacggggacagcctgtccggctggtggctgctgtggaagcggctgaatccctgggctgacaaggtaaaggttccagacatggctgaaatccagtcccgcctggcctacgtgtcctgtgtgcggcagctagaggttgtcaagtccagctcctactgcgagtacctgcgcccgcccatcgactgcttcaagaccatggactttgggaagttcgaccagatctatgtgagtgggcaggagtggcatggtgcctgcataggtggtccggctaagctttgctacttaaagcccagagtggtatgagggggaggaatccaggaggaatccaggaatcccatctggaatctctggaaaacagatcagtgatcaattggtgatgtctgcaggggatgtagtaggggtgtggctgtgcatgtgctgtgtaagaactttctccttataggccagctgcacccctggaagcactgtatagtgatttctactgccatttctgcattggtgggaatgagaatagtgatgaagcagaaatgtctgccacagttccaggagagggaggtagcagtgcgtgtgttatgtgctactgaccctgaaaaatgtgccatagcccaagccaattgaaattgatcagggggccaggcatggtggctcatgcttgtaatcccagcaccttgggaagctgaggtgggaggattgcttgaaaccaggagttcaagaccagcctgtgcaacatagcaaaaccccatctctacaaagattaaaaataaaaaattagctgggtgtggttgtgcatgcctgtcaccccagctacttagggggctgaggtgggaggaccgctcgagcccaggagtttgaagctgcagtgagctatgattgcgtcactgcactccagcctgggtgacagagcaaaactctgtctctaagaaaaagaaagggccaggcatggtggctcatgcatttaatcccagcattttgggaggccgaggtgggcagatcacttgaagtcaggagttcaagaccagcctggtcaacatggtgaaacctcatctctactaaatatacaaaaattagctgggtgtggtggcacatgcctatagtcccagctacttgagaggctgcagcaggagaaatcgcttgaacctaggaggcagtggttgcagtgagccaagattgtgccactgcactccagcctgggtgacagagtgagactctgtctcaaaaaataatattaattttaaaaattaaagataaaaataataaaaatttttttaaaaagaaagaaattgatcagtagctgcagcccagaagccctgagtctgagaagagatgtgtgatgtcccttgtgggctcactgggatagcatgccatgagaaattcaagatgtttgctgtgggcttggggatggcgacatccacagatgtactgcctgtttgcagacttcaaaataagctcacacatcaccaccttgtgttatttgctacccagcaccctgcatggggctgtgtgggaaagaacatggagagattgattggtaatgtctgtcaagggcaggacaggggatgtgtaggcgagtgtgctatgtgcagctgactctgaaataggtttagtctcaaatgcaactcccccagagaatcaggcttttgaggggccagagaatgggcagacagagtggggacaagcaaagcagggttgcagacatggacccagcccctcatttcccacaggatgtgggctaccagtacgggaaggcggtgtttggaggctggagccgtggcaacgtcattgagaaaatgctcacagaccggcggtctacagaccttaatgagagccgccgtgcagacgtaagcctgtgatgcccccagggccactctgactccactgattacagaacccaagcccccttaaagtctccccgaaacctcagatgaccccacatgtccctgggttttgctgagctctcagacctctgctgacttcagagagttcccaccctaggatctcctctgagcccccaatgcaccactgggccccccaggggccccaagactctgtgggccccccctaagagcctcaccagtgtcaccccacaggtgcttgccttcccaagctctggcttcactgacttggcagagattgtgtcccggattgagccccccacgagctatgtctctgatggctgtgctgacggtgaggggcccaggggaccccccaagagggaggggagtggctggagatggcaggccagccccaatcccctcacctgtgccctgctccccgattccaggagaggagtcagattgtctgacagagtatgaggaggacgccggacccgactgctcgagggatgaaggggggtcccccgagggcgcaagccccagcactgcctccgagatggtgagagtgggtggcccagggtcccctcacatcccccagagggtcatgagtacagtgtcaggcaggggagccgggggcgtatttgagatcctgtgtgtgctgggtgctggctgacatgtgacgcatcagtgtcccgtgctgggtgacgtgtgtgtgaccttccctcgcaggaggaggagaagtcgattctccggcaacgacgctgtctgccccaggagccgcccggctcagccacagatgcctgaggacctcgacaggggtcaccccctccctcccacccctggactgggctgggggtggccccgtgggggtagctcactccccctcctgctgctatgcctgtgacccccgcggcccacacactggactgacctgccctgagcggggatgcagtgttgcactgatgacttgaccagcccctcccccaataaactcgcctcttggaaatggcttcctgtcgttttcggactggggacccaccttctgtgctcaggatggctggggctggggtctgacaccacctggtgcttgccccccacagggaatgcctttctagaatccacacggagccccactaggtgcttgtccccactctgccccttctctggctcctcagaagccagtgctgactccggaccacagggccagacattccgtgccaccctcccgggctcacaggtgctcttgggggcccgatatggcacccctcaatttctttctgtgtgttttttgttttttgtgtttttttttttgagatggagtctcactctgtcacccaggctggaggctggagtgcagtggcatgatctctgctcactgcgacctccatctcccgggttcaagcgattctcctgcctcagcctcctgagtagctgggattacaggcgcccgccaccacacccagctaaattttgtgggggggttttttggttttgttttgttttttgttttaatttttgagacagtgtctctctctgtcacctaggctggagtgcagtgatgcgatctcagcttattgcagcctccagctcttggattcaagtgattctcatgcctcagccttccaagtagctggggccacaggcgagcaccaccatgcctggctaatttttgtattttttgtagagaaggggtttcaccatgttggccagtctggtctcaaactcctggcctcaagccatccacctgcctcagccttccaaagtgctgggaatacaggcatgtgccaccacacctggccttaatttttgtatttttagtagagacggcatttcatcacgttgcccaggctggtctcaaactcctgacctgaagtgatctgcccgccttggcctcccaaagtgttgggattacaggcatgagcctccttgaccggccagaacggtttatcttttttatgagtgaataatatcccattgtgtagatggaccacatggtatttattggttcatctgttggacgcttgagttgcttccaccttttggctatggggagtcatgctgctgtgaacacaggtgtacaactatctggatccctgctttcaacttccttggctagatgcccgggagtggaattgttgggttacatggagattctgtgttgaattgaagaaacgccaaacttttccatagcggctgcaccattttaaattcccaccgactgtcagtgcctcgagctgtcagcaccatggacagggatggtgctgtccgaggtgctactgacgccccctctgtgtctttccctccaagcccccccacccccgccgatatccctgcgccctccagatctctgagttttgagggtggagggggacatttaggggaaagttcagtccatagtttggcacctactggtgtctgtatcttaactggctccccttccatcctggctcacaaggctccagttgtaccagccttcattctattcctcaaattctccatcgattcctggctcaaagcacagaattgggctttttactccctgtgtagctgattaagcctgtcctcaattgtcacctcttcggactgtgtacagtaacttccctgttcccgttggcccctgtctccttgcctttaaagcacttcattagtcacagttgcttcacttgtttttattgttttcattgtttattattactattattattattattattattattattattattattattattattattattttgagacaagatcccactctgtcacccaggctggagtgcggtgatgtgatcacggcttactgcagctttgacctcctgagctcaagtgatcctcccacctcaacctcccgagtaactgggactacaggcgcgagtcaccacatgcagctagtttttttttttttttttttgtagatatgggggtctcaccatattgtccaggctggtctcaaacttctgggctcaagcgatctacctgtcttggcctcccaaagtgatgggattacaggtataaagtgttgttggtgttgttgttttgtttgtttgtttgtttgtttttgagacagagtttcactctgttgcccaggctggagtgcagtggtgtcatctcggctcactgcaacctctgcctcccgggttcaagctattctcctgcctcagcctcccaagtagctgagattacaggcaaccgccaccacacctggctaatttttgtatttttaatagagacggggtttcaccatgttggccaggctggtctctaactcctgacctcaggtaatctgcctgcctcagcctcccaaagtgctgggattacaggtgtgagccaccacacccggcctaaagtttttaattaacttttttttttttagagacaggatctcactctgttgcctaggctggagtgcagtagtgaagtcatagctcactgcagcttcaacctcccaggctcaagtgatgctcccacctcagcctgccaagtagctgggactacaggcaagcaccaccacacctggataatttttaaaaaaaaattttggtagagacaagggtctcgctaggttgtccaggctgttctcaaattccagggttcaattgatccttctgccttggccatccaaagtgctgggattacaggcacgagccatcacatcaggcctcacttgcttacttgtttctcatctgtctctgcaagacacacttaaatataagttccatcactggaagaaccttgcatagaacagcacctggctcatggtaggtgctcagtaaatgtcgaatgacatcaagctccaaagacgaagcaaagatccctgagataactcccactctctctctttctctctgattttgttttgttttattttgagatagggtctggctctgttgcccaccctggagtgcagtggcgccatctcagctcactgcaaccacgcccaggcttaaaccatcctcccacctcatcctccctggtagttgggaccacaggcacatgccaccacacctggcttaatttttgtatttttgatggagacaaggttttgccatattgcccaggctggtcttgaacctgggctcaagcaatccaactgcctcagcctcccagagtgctgggattacaggcgtgagccacctcacccagccgacaatacgtttttgttgctgaagtcaccccatctgtggaactttgtgacagtgaatcctagcaaattaacatagaagcccttggctagactcagctgccatgatgtggatggtgtaatggatcaggcaggacaagtcaggttatgccgctgtaacaaataacaccaaagtcttggggggcaaaaacaatacaaaagtaatttctgagctgggtgcagtggctcatgcctatagtcccagctacttgggaggctgaggcaggaggattgcttgagcccaggagtttgagaccagcctgggaaacatagcaagacctcatctctaaaaaactttttaaaatcagctgagcatagtggcatgcacctgtagtctcggctatttgcgaggtcgaagcaggagaatcgcttgagcccaagaattcgaggctgcagtgagctatgatttcaccactgcactccagcctgggcgacagagtgagactgtctctaaaacaaaagtagtcactatctggaatgttttgggtcactgtgactgaggaaagacatctctggaaggcctcatacccatcattaaatactctggtccagaaatgatgcaatacttttatctcactgctcattggctagaaaaagtcacatggtcctacccaactgtaagtggccaggaaaaaacagccctaccatgtgcccagaagagagagcattggaaatatttggtgatcatcactaatgatcaacaggctgggctgcagtagctcacgcctgtaatccaagcactttgagaggccgaggcgagtggattgcttgagctcagtagttcgacatcagcctgggcaacatggcaaaaccccatctctatcagaaatacaaaaaattagccaggcatggtggtgtgagcccgaaatcccagatcctagggaggctgaggtaggaggatcacttgagccaagggaggtctaggctgcagtgagccatgatcatgccactgcactccagcctgggcaatagggcgagaccctgtctcaaaaaattaaaataaaaacaaacaaaaaacaaactattgactaacagagttggaactgagcctcaactggaccttcctggactctctaggctacccctctctggttccagagcttgagactcagctagcgccaagaaattttgaggttacagtgaggacctgggttcagggtcaggggccctgtcctgcaatccacaggagctggccacgaggtgtggacccaagagactgataaagtcacattctcaagagtgttttcttggtctctctctctctgtctctctctgtctctctctgtctgtctctctgtctctctctccccctctccctctccctctcctctttttctttctttctttgacagagtctctatctgtcacccaggctggagtgcagttgtgtgatctcgccttagcgcaacctccacctcctgggctcaagtgattctcccacctcagcttcctgaatagctgagattataggtgcatgccaccatgcccagctaattttctttttaattcttagtagagatggggttttgccatgttggccaagctgatcttgaactcctgacctcaagaaatctgcctgccttggcctcccaaaatgctgggattacaggcatgagccaccgcacccagcctcttggtgtgtttgttgcccagtgtctggaaatggccatgtagaggttggacagggaagaaccaacctggtcaggctgtaggacatcttttggccacccaggccaagtgcagtggctcatacttgtaatcccaacactttgggaggccaaagcaggaggatcgcttgaggccaggggttcaagaccagcctgggtgacatagtgagactctgactctatgaaaaatattaaaagtagctgagtgtgagggtgggcttctgtagtcccagctacttgggaagctgaagttagaagatcgcttgagcccaggagttagaggctgcagtgagctataattgcaccactgcactccagcctgggcaacagagtaaaaccttttataaaaataatattaataataagtttaggccaggcacagtggctcatgcctgtaatctcagtactttgggaggccaaggcaggtaggtcacttgatgccaggagttggagaccagcctggccaacatggtgaaaccccttctctactaaaaatacaaaatagctggatgtggtggtgcgtgcctgtaatcccagcttcttgcgaggctgaggcacgagaattgcttgaacctgggaggcagagattacaatgagccgagatcatgccactacgctccagcctgggtgacagaataagcctctatctcaaaaaataaataaacaaattaaaaaaaataagaggctgggcatggcggctcacacctgtaatcccagcactttgggaggctaaggcaggaggattgcttgagcccaggagtttgaggctgcagtgatctattatcacaccactacactccagcctgggtgacagagcaagaccctatctctgaaacaaaaataataacaaaaaaagcaaaaaacagggaattttcctttccttctttattgccagaaaggaaaaaaaaaatcagggtcctacatttgcacagattggcaggttctgcccattgctagccagctgaccttgggcttcccttcccccattctcaaatttgtcacctgtgtattctacctaattttagtcccagtgggttgctttgtaatttatctttatttttatttttttgagatggagttttgttcttgttgcccaggcttgagtgcaatggcatgatcttggctcaccacaacctccgtctcagctcaccgcaacctctgcctctggagttaaagcgattctcctgcctcagcctcccgagtagcagggattgcaggcatgtgccgccacacttggctaattttgtatttttagtagagacagggtttctacatgttggtgaggctggtcttgaactcccgacctcagacgatcttcccactttggcctcccaaactgctgggattacaggcgtgagccaccatgcccgacctgtgatctaaataaaaggaaacaggctgggcgtggtggctcacacctgtaatcccagcactttggggggccaaagtgggaggatcgcttgacgtcaggagttcgaaaccagcctgggtaacatagtgagacccccccccccgtctctaataaagaataatacattaataaaataaaataggccaggcacggtggctcacgcctgtaatcccagcacttcgagaggccaagacgggtgggatcacctgaggtcaggagttcgagaccagcctggccaacatggtgaaaccccgtctttactaaaaatacaaaaattagctgggcgtggagacgcacgcctgtaatcccagctactcaggaggctgaggcaggagaatcgctcgaacccaggaggcagaggttgcagtgagctaagatcgtgccactgcgctccagcctgggcgacagagcaggacaccgtctcaaaaaaattaataataaaataaaactaagataaaacaaaacagagctccttgcaggaggaaactgacgcacacacctacctggaccagattcttacttttctgccaccagggggcggtcctgctatggcgttcaggcgtctggctccggggtggagctttgctgactaggggagggttaagcaccgagtagctgtgggctgacttactgctttttttttttttttttttgtcgtttagaattaacatttattggaaaggaggggaggggagggagtactgttctcattataaaatcattacctgtgtgcttcagccaggtgcagtggctcatgcctgtaatcccagcactttgggaggctgaggcaggtggatcacttgaggtcaggagttcgagaccagcctggacaagaagatgaaaccccgtatctactaaaaatacaaaaaatttagccgggcgtggtggtggtcgcctgtaatcccagctactcgggaggctgaggcaggagaatcacttgaacccaggaggtggaggttgcagtgatctgagatcacaccactgcactccagcctgggcaacagagtgagactccatctcaaacaaacaaacccacaaacaaattattacttgtgtgcttagaacaaatttataaaacaaatgcaacataaacataaaggtaatatgtgttcatttggaaatatatgttcatggaaagcagagtgtaaaaaaagaaaaggtcacaggaattccaccgcctggatgtgaacactgctaatactcccttcttttttcccaatttccttccttttgttttgttttgttctgttttgttttttgagatgaagtctcactctgtcgcccaggctggtgtgcagtggtttgatctcggctcactgcaacctccgcctcccgggttcaagcgattctcctgtctcagtctcctgagtagctgggattacaggcataagccaccatgcccagctaatttttgtatttttagtagagatggggtttcaccatgttggccagctggtcttgaactcctgacctcaggtgatctgcccaccttagcctcccaaagcaatgggattacaggcgtgagccccagtgcctggcccagagtcagttttttattctgcaatcaatttaaatgtcctagatttgcttttattgcaagtcagtgccttgaaagaaaagatgagagcgtttgatgacatgaaaacatgcttaacaaagacagaagacaaacaaagccaatagcctggaaggaaatatttgtcacataaattaggcagatgatcgagctttgttcatgtttattgaacacttactattatatataccagccattgtttggggggggttgtatttatcaaataacttaatttttagccctttgatataggtagtattattatttccttttttatctttttggtgtttttgttggtgttcttgctgtttttgagaatgggtaccgctctgtcgcccaggctggagtgctattgggcaatcatatctcacagcagcctcgacctcctgggctcaagcaatcctcccacctcagcctccccagtagctgagactacaggcccctgtcaccacacctgactaatttgttttattttttcaaagtgagatggcggaggcgggtggggggtctcactttgttgcccaggccggcctcgaactcctgggctccagcgatcctcctgcctcagcttcccaaagtgctgggattacaggtgtgagccaccatgcccggccagttttcacttcttaatttggcaaatgctaaaaatattaacacatccagtcacactgaaagttgggtgaataagaaacatcttcacagtgttaggctgggaaactgtcaattatggagattttagggggaagggaatttgactgtcatcatgcaacaaatttttttttttttttttttgagacggagtctcgctctgtcgcccaggctggagtgcagtggcgtgatctcggctcactgcaagctccgcctcctgggttcatgcccttctcctgcctcagcctcccaaggagctgggactacaggcgcccgccgccacgcccggctaattttttgtattttgagtagagacggggtttcaccatgttaaccaggatggtctcgatctcctgaccttgtgatccgcccgccttggcctcccagtaaacaacaaatataaagcgcataacttttgacctagccgggtttcgtccaacaatcaatcctctataaacgcatgcgtctaaagatgtgtgttcctcacagcgcttttctgcaatgatgccgttgcttataaaagtgaaaattggaaaacagtctcagtgactgacaacagaggcatagtttaataaattagggcacagtaccttacgggaatgctctgaagccattaacaagaatgaaacagacttatagctattgacataaaaaaaattcctaggtactctgctccacggataaaaagagtcatagaacattgtgtacagtatgatcacatttacgtccaagaccgtccatgacacacaggtttgtacatgcacgggatgccctgggaggatagttccttgggaagaaatatcagggtgggaatttaagggggagaatttcaatatttttacttttctactgtttgacactttaacaatgagattgcattattgtgataatttttaaatttatttgataatttttaaagcccccagaaatgatcctgttttgaaattgttaaatatttctttttgttttacttatttatttattttcgagacagggtctcatcccatcacccaggctgtagtgcagtggcactgtctcagctcactgcagcctctgcctcctgggttcaagtgatcctcccacctcagcctcccaagtagctgggactacagggcatgtaccaccatgcctagctaatttttttatttttagtagaggtgaggtctccctatgttgcccaggatcgtctcaaactccttggctcaagcaatctgcctgccttggcctttcgaagtgctaggattacgggcatgagccaccttgcctggctctttttaaattttattattttttattttacaaaagtagagacagggtctcactgttctgcccaggctggtgttgaactcctgggctcaagtggctggcccacctccacctcccagagtgttgggatcacgggcttgagccatcgcacctggcctaaatatttctttaaaatgacagaaagccgggcatggtggctcactcctgtaatcccagcactctgggaggccgaggcaggcggattacctgaggtcaggagttccagaccagcctggtcaacatggcaaaaccccatctctactaaaaatacaaaaattagtcccagctacttgggaggctgaggcaggagaatcgcttgaacccgggaggtggaagttgcagtgagtcgacatcgcactactgcactccagcctggacgacagagcaagactctgtctcaaaaaacaataacaaaaacaaaacagaaaataaaacataacagaagacaggcagagcaacagtctgggaggaaatatttgtcacatcaattaggcagaatatcaagcattgttcatgtttattgaacacttattgtataccagccactgttttgaggcgggggggggttatggttatatttatcaagtaacttaatcctgtgatcatggttgtttctgacatttcagtgttatgaatgaaaccgggatgaatatctttttttttttttttgagatggagtttcactcttattgctggagtgtaaaggcacgatctcagctcactgcaacctccatctcccgggttcaagcaattctcctgcctcagcctcctgagtagctgggattacaggcatgcgccaccacgcctggtaaattttgtatttttagtagagacagggtttctccatgttggccaggctggctcgagctcccaacctcaggtgatccacccgccttggcctcccaaagtgctgggattacaggcatgagccacggcgcccggcgaggggatgaatatgtacgaatcttcacgtgcatctgtgaggatatctttatgttatctctaatttttgtgtttggtttatttcagagttgggatctcactatgttgcccaggctggtcttaaactggacgattctccggcctcagtctctcaaagcgctgggattactgacaagccactgccccagtcctgcttagttttctttacattacaaagcaaacttttgtgtcagggactaaaatcaggtagaatacaaagatggtaaaacagtctgggagagcttaaacccgaggccatctagctggcaagcggcagaacttgccactctgtgcacgttcaagtccctgttcttttgtttgtttcttgttttttttttagagacaggttctctctctgtcgcccagctgggagggagtgcacaggcatgatcatagctcagtgcagtctccacctcctaggctcaatcgatcctcccacctctgcctcccaagtaggtgggactagaggcatgcgacaccatgcctagctcatttttaattttttttttataaagacggagtcacggctgggcacagcagctcatgtctctaatcccagaactttgggaggctgaaaccagcagatcacgaggtcaggagttcaagaccagcctggccaacatagtgaaaccccgtcctactaaaaattcaaaaattagccaggagtggtggcaggtgcctgtaattccagctactcaggaatgctgaggcaggagaatcacttgaactctggaggcagcggttgcagtgagctgagatcatgccactgcactccagcctggggcaacagagtgagacttagtcctaaaaaaaaaaaaaaaaaaaaaaaaaaaaagccaggcatggtgactcacacctataatcctagccctttgggaggctgaggtgggtggatcacctgaggttgggagttcgggaccagcctggccaacatggagaaaccctgtctgtactaaaaatacaaaaattagatgggcgtgatggcgcatgcctgtaatcccatttactcaggaggctgaggcaggagaatcgcttgaacccaggaggtggaggttgtgataagctgagatggcgccactgaactccagcctggtcaacaagagccaaactccatctcaaaaaaaaaaaaagatattgatttttaaatttttcaattcccaattattcattgttatcgtgtagaaatacagtttagttttatatatagaccttgtattctacaacttcactaaatcacttactggatctagtaggttttttgtacattcattctgattttttgtgtagatgatgttttatttttctttcttttcatatatgttcgctatcatctttctcttctttccaagtctgtgtgctttttatttcatttcctaccttattgcactgtctgggacttccaatacaatactgaatagaggtagtaagaacagacatccttggccaggcatggtggctcacgcctgtaatctcagcactttgggaggccaaggtgggcggatcacctgaggtcaggagttcgagaccggcctggccaacaatgcggaaccccgtctctactaaaaatacaaaaattagctgggtgtggtggcatgtgcctgtaatcccagctacttggcagcctgagttgggagaatcgtttgaacctggaaggcagaggttgcagtgagatgagatcgtgccactgcactccagcctgagggacaaagcaacaacaccctgtctcaaaaaacaaaacaaaaaccaggctgggcgcggtggctctcgcctgtaatcccagcactttgggaggccgaggtgggcagatcacgaggtcaggagatcgagatcatcctggccaacatggtgaaaccccgtctcaactaaaatacaaaaaaaaaaaaaagaagccaggcaaggtggcacgcgcctgtaatcccagctactcaggaggctcaggcaggggaattgcttgaacctgggaggcagaggttgcagtgagctgagatcgcgccactgcactccagcatggcgacagagagactgtctcaaaaaaaaaacaaaacaaaacaaaactggacatccttaccttgtttccaatcttaggataaaacattgagtcttactattaagtatgatattagccatgtttcatgtatttctttgtttaatctcttaatttggcaattccattgattgattttattttattttatttatttttttgagacaaggtctccctcttatcccccaggctggagtgcactggcgcgatctcagctcactgcaacctccgcctcccgggttcaagcgattctcctgccttggtcccccgagtagctgggattgcaggtgcctgccaccacacgcagctaatttttttatttttagttgagacggggtttcaccatgttggccaggctggtctcgaactcctgacctcaggtgatccacctgcctcagcctcctaaagtgctgggattacaggcatgagccatcacacccggccactttttttttttttttttaaacagagtctctctctgagccaccttgcccagtcccattgattgattttcaaatgccgaacccaccttgtatccctcggacaaattccacttgatcaggacatgttttcctctttatatactcctggactcaatttgctaatattttgtgatggattgtttgtatcgatgttcctgaagaatattggtctgtacttttctttccgggcatggtggcaggtgcctgcaatcccagctactcaggaggctgaggcaggagaatcgcttgaaccagggaggtggaggtttgcagtgagccaaggttgtgccattgcactccagcctgggtgacaagagcaagactccatctcaaaataaaataaaggcgtagtggttttgcattttgaggaacttgtctatgtcaggtaaattgtcaaatttattgccacagagttgttcataaaatttcctcattatccttttaatgtccatagggactgtagtgatatcccctcttttacctcagtgtgcaaatgcttttcaagcctctgcttctctcacattttctattgtcccattggccaaaataagtcatatggccaaaccctgagtcagcatgggaggggactccccaagggcgtggatacgagcagatgtgaacaaaccgggaattattacttctacaatccaccacacgaagtccctccctgtggtaagtttctgcccctaagggacagatttgttcacattagttgcttggtgatttattcatatatatttatttatatatttattaatatgtatttatttatatatttattaatatatatttatttatatatttattaatatatatttaacaaatacattaataaatatatgttaatatatttattataaataagtttatagaaatatatatatatggccaggccaggcgcagtaactcacacttgtaatccgagcacgttgggaggccgaggtgggtagatcaattgaggttaggagttcgagaccagcctgaccaacatggagaaagcccgtccctactaaaaatacaaaagtagtcaggcgtggtgtcgcatgcctgtaatctcaggtactcgggaggctgaggcacgagaatagcctgaacccgggaggcggaggttgcagtgagccaagattgcgccattgcactccagcctgggcaacaagagcgaaactccgtctcaaaaaaaaaaaaaaaaaattagctgggcatggcagtgggcacctgtaatcccagctacttgggaggctcagccaggagaattgcttgaacctgggaagcagaggttgcggtgagccaagatcgcaccactgcactccagcctgggtgacacagcgagactctgtctcaaaatgaaataaaataaaataagtaataaaataataaactctatgacgactgcaagtcacttcacaccttgaaaatgatgtttacatctaggatatatatatagacaaggtctcactgttttccaggctggcgtgcagtggcgtgatcacggctcactggagcctcaaactcttgggctcaaaacatcctcctgcctcagcctcctaagtagctacagaggtgctccaccacaccctgctaattttttaaatcttttgtagagatgtgggtctccctttgttgcccaggttggtctccaattcctgggctcaagcgatcctcccgctttggcctcccaaagtgctgggattacaggcataagccactgcacccagccttaggatacataacttagtagagaagttgagaagtgaggagagcatactgaaaggtaagtcagggtgatgggggctcagaaagtaccagaagggccaggaaacagattccacaaacatcaattgagtatttactgtatgcatgaatctgctaaaggaataactgtgtggtcaacagagctggaaaatatggcttttctcaataatgagctccctgttcacagaaagaatcaaggataggctgaattttgtgagctccggggaaaggtttggactagcagatgtttaaggctctgttcttttggaatagtctataattccacaacagggatagtgtttgggggaaagatagaaggtggacaagaaacagaaaatgaggacactggctgggcgtggtggctcacgcctgtaatcccagcactttgggaggccgaggcgggtggatcacctgaggtcaggagttcgagaccagcctggccaacatggtggccaacgtggtgaaaccccatctctactaaaaatacaagaattagctgggcattgtggtgggtgcctataatcccagctacttgggaggctaaggcaggagaatcgcttaaacccgggaggtggaggtttcagtgagctgagatcacgccactgcactccagcctgggtgacagagtgagactctgtcagaaagaaagaaggaaagaaggaaaaaaagagaggagaaagaaagaaggaaggaaggaaggaaagaaggaaagaaagaaagaaaggaaggaaggaaaggaaggaaggaaggaaggaaggaaggaaggaaggggaaggaaggagaagggaagggaagaaaggaaggaaggaaggaagagagagaaagaaagaaggaaagaaagaaagaaaaagaaagaaagaaagaaaaagaaagaaaaggaaagaaaagaaaagaaagaaaggcaggccaataggccaggtgtggtggctcacgcctgtaactccagcactttgggaggccaaggtgggtggatcacttgaagccaggagtttcataccagcctggccaacatggtgaaaccctatttttactaaaaaaattaaaaaaattaagttacccgggcatggtggtggctaacacttgtagtcccagctacttgggaggcagaggcaggagaatggcttgaacctgggaggcagaggtggcagtgagccgagatcgtgccactgtactccagcctgggtgactgaggaaaactccgactcaacaaaacaagacaaaaaaccaacaaaaaagaggacaccgaaggaggaaggatgggagtgcaggagagaaccgcttgggagaggagagaggaaagggatgctggataggcagaccccaaagtttgcgcttagcccgggagggttcttggcttcaccgaggaaataattcaagggtgagctggtggtgtaagttttactgaagtgacagcagtagcagaggttctgctcctggcagagcagggctgccccataggcagggagcccagaatagcagctgagaggcagtgctgcagtgagacttatacctacttttaattgcatgcaaaggaaggggcagattatgcagaaatttctagaaaagggtggtaacttctgggtgactgccatggaaacgggtggtaagttctgcgtgttgctatggcaatggtaaactgacatggcacactggagggcatgtcttagggagaggtgctttcacctgttccccgtttcagctagtgttttttgtttgtttgcttttgggggacggaggctcactctgctgcccaggctggagtgcagtggtgtgatcttggctcactgcagcctctgactcccaggtcagcctcccaagtagctgggattacaggtgcccaccaccacgcccatattttcagtagagatggggttacctcatcttggccaggctggttttgaactcctgacctcaggggatccaccagcctcagcctcccaaagtgcggggattacaggcatgagccaccgtgcccaggctgtttcagctagccttcagtctggtccaggctcttagccccatctcgggagtccagtcctgcttcctacctcaaaaggagtgatgtggccaccaggtgcggtggctcacacctgtaatctcagcactttgggaggctgaggcaagtggatcaccagaagtcaggagtttgagaccagcctggccaacatggtgaaaccctatcgctactaaaaatacaaaaattagctgggcgtggtggcgggtgtctgtaatcgcagctactttggagactgaggcacgagaatcacttgaatccaggaggcagaggttgtagtgagccaagatcgcaccactgcactccagcctagatgacagagcaagattctgtctcaaaaaataaaacaattaaaaaaaaagaatggatggtgggtgatgatgcagagaggtttaggaggggaggttttaggtaaaacctccctcactgactcctctcactgacttcttcatcggacaccctctttcctgccttcccacacacataccgctaagactgtcttccccgaggtcactataggacgccgtgtcccgagatccaatgcaaccacccacttcttatctcacacagcctccaggccagcccaagacactggagactactcccaccttcccaaagcctttgttcccttgttagtttgatttcctccctccctggaagctcagagcctcctctttctcctccatcccctcccagggccacatcctcaacccatgtctcacattccatggagcttcatttatatcactggcacacctgtattcccaatctatgtttgttggtttgttttgagtcagagtcttgctctgtcccccaggctggagtgcaatggcaccatctcggctcactgcaacctctgcctcctgggttcaagcgagtctcctgcctcagcctcctgagtagctgggattataggtgtgtaccacttttttgtattttattttattttattttttcgagacagggtctcactctgtctcccaggctcgggtgcaatggcatgatctcgcctcactgcaacctccacccacctcccaggttcaagtgattctcctgtctcagcctcctgagtagctgggattacaggcatgcaccactatgcccagctaatgtttgtatttcagtagagacgggatctcaccatgttggccaggccagtcttgaactcctggcctcaagtgatccacccgccttggcctcccaaagtgctgggattacatgtgtgagccaccacacccagccttgtattcctactcttgaccatgacttggagggtctggatctgcagagcccagaaactcctgcaccgtgtagtcttggtacacggaggtatcatgaaaccccaaagtttgtatgtgatttgctttttcctgtgtatctgcatggttgataaggacaagaagataccacagtttcagaggatgatacagacattcatttgtgttgggctcctgttggcttcaccaatatcaaaaaagcttccagctgggcgtggtggctcatgcctgtaatgccagcattttgggaggccatggcagactgttagtttgagcccaggagtttgagaccagcctggacaacataatgagaccccatctttttttttttttttgagacagagtctcgctctgtcacccaggctggagtacagtggcgcaatctcagctcactgcaaactctgcctcccagattcaagcgattttcctgcctcagcctcctgagtagctgggactacaggcgcctgccaccacgcccggctaatgttttgtatttttagtagagatggggtttcactgtgttagcctggatggtcttgatctcctgacctcgtgatctgcctgccccggcctcccaaagtgctgggattacaggcttgagccaccgcgcccggccgagatcctatctttaaaaaacaacttagccgggcatggtggcacccacctgtggtctcagcaacttgggaggctgaggtgggaggatcgcttgagcttgtaaggtcgaggctgcagtgagctatgatcgtgtcactgcactccagcctgcgaaacagaaaccctgtctcaaaaagaaaagaaaagagcagctggagcccccttatctctgcacgtctcccccactctcaatcaccttggtctttttttttttttaatctaccaaagtcactttctcgcctctgtctgcccaaacacctccttctaccagagggagggaaaggaagtttcttcctatcaaggacatataaatgacggagagcacacttgaaataatgtctctcccttgacctacatcagtagtgagcatctgcatgaatgtattgatgtgtgtgtgcacgtgcgcagatgttcgcgttaatgcatgcaattctgtgggtattactggttacctttgtaaatatttgagtatgtatttgtggatattatctatattttattttattttatttattttgacacagagtctcgctctgtcaccctggctggagtgcaatggcgaaatctcagctcactgcaacctccgcctcctgggttcaagcgattctcctgcctcagccttccaagtagctgggattactggcgcgcgccaccatgctgggctaattttttgtatttttagtagagacgggatttcaccatgttgggcaggctggtctcaagctcctgacctcaggtgatccgcccaccttggtctcccaaagtgctgggattacaggcgtgagccactgcgcccggcccaccattatagtgtcatacagagtagtttcgttgccctaaacatcctctgcattccacctactcatctgtcctccctcttaacccttagtaaccactgaggttttactatcttcatagttttgccttttccagaatgtcgtggagttggagaagtacacaataagtggccctttcagactgtgtttttcacttagccatatgcacctaagtttctttgatgtcgtttcacagcttcagagctttttttttttttcgagaaggagtcttgctctgtcacccaggcgggagtgcagtgacatgatcttggctcactgcaacttccacctcccaggttcaagtgattctcgtgcctcagcctcctgagtagctgagattacaggcaagcgccaccacgcccagctaatttttgtttgtttttgtttttgaggcagagtctcgctctgtcgcccaggctggagtgcagtggcacgatctttgctcactgcaagctccacctccccgattcacgccattctcctgcctcagcctcccgagtagctgggactacaggcgcccgccaccacgcctggctaatttttttttttttttgtatttttaatagagatggggttttaccatgttggccagggtggtcttgaactccaggcctcaagtgatccacccaccttggcctcccaaagtcctgggattacacacatgagccaccgcgccggccttttttgctttttgtttcaaagagcgatagggtcttgctgtgtcacccaggctggaatgcggtggtgtgatcatagctcactcctctcactcttttggggatcttgtgtattggtggaggtgcctgggcccgctctcatcatcatgtggtaaagatgacaaatttctggcctccttggtggccctccgggatgtgaaactcaacctgtccaagacgaaactcatcctccccacccagcctggcccctcatctcctgtccccatctcagcatgcagcaccaccatctacctgcttgcgaaaggcagagatctgggcatcttccaagactccgccctccctctcctggccgcctgttcccatccaccagcaagccctgccaattccatctcccaacacattctgcacccgtgcgtgctccccggccccaaagccacaccctggggctgacctcgttactgaagcctctgtggtctacctgaaattgtcttggcaacaccgggtcccctaagggcaacctgaagctcacagatgtgcatgggtttttctggaccgagctttcaggtttgattttgtcatccgtatgtacgcagttttctttctttctttctttctttctttctttctttctttctttctttctttctttctttctttctttctttctttctttctttctttctttctttctatttttttttttttgagacagagtcttgctctgtcacccaggctgcaatgtagtggcacaatcacagctcgctgcagcctccgcctcccgggttcaagcgattctcctgcctcagcctcctgagtaactgggattacaggtgtgcaccaccatgcccagcttacttttttctatattcttggtagagatggggtttcaccatgttggccaggctggtcttgaactcttgacctcaagtgatccgcctgcctcggccccccaaggggctgggattacaggagtaagccactgagcccaacctgttcatggtttttaaggggacgatgattcctcctgctgggggacatttggcaatgtctggagacattttgggttgtcacaactggagggggctgctagtggcatctggtaggtagagaccaagggtgctgctaaacttcatgcaatgcacaggatggcccccacagcaaagagttatccaaatattctacatctcaatagtgccgtgatcaagaaaacctgtacttgtactacccgaagtgtgagctgcagactgcagctggtccccaagctgttgatttcccatttagatgagagagtccagaaaaaaaaagctttcagaatctttatttttatttatgttttttgagacggagtctcactctgccgcccaggctggagtgctgtggcataatcttggctcactgcaacctccgcctcccaggttcaagagattctcctgcctcagtctctggaatagcttgcaccaccatgcctggctaatttttgtatttttagtagagacagggtttcaccatgttgcccaggctggtttcaaactcctgacctcaggtgatctccctgcctcggcctcccaaagtgctggggttacaggcatgagccaccgcaccctggccagcttttagaacctttaaaggctgggtacagtggctcatgcatgtgatcccaggactttgggaggccgaggcaggaggatcgttggagcccaggagttctagtgcagcctggcaacatagcgagaccccatctctgcaaaataaaaaataaattagccagatgtggtggcacatgcttgtggtcccagctgcttggaaggctgaggtgggaggattgcttgagcctgggaggtccaggctgcagcaaaccatgatcacaccactgcactccagcctgggtgacagagtgaagcactccagcctgggtgacagagtgaaaccctctctcaataaataaataaatagaatcattatagtaatttcacacagtaattttatgacagctgggctcatgttctgcatgccttttaaattccttcctgtattaatagaattttttatttttttattttcattttcttttttttttttttttttgagatggagtttcgctctcgttgcccaggctggagtgcaatggcgctatctcggctcaccacaacctccgcctcccaggttcaagaaattctcctgcctcagcctccagagtagctgggattacaggcatgcgccaccacgcccggctaactttgtatttttattagagacgggcgtttctccacgttggtcaggctggtgtcaaactctcgaactcaggtgatctgcccgccttggcctccaaaagtgctgggattacaggtgtgagccaccgcgcccggccttttattttcattttcttggagacaaggtctcactctgttgcccaggatggagtgcagtggtgcgatcacagctcactgcagcctccaactcctgggctcaagtgaccctctcacctcagcctcctgagtggctgggactacaggcttgtgccaccatacccagctaatagactttttaaagaacagtgttaaattttcagaaaaatcaagtagatggtacagagagtttgagtacactcattctcccccaacacatacacaatacaatttccccttttattaacatcttacactggtatggcacatttgatacaatcaatgaaccaatttttttttttttttaagtcagagtctcgctctgctgcccacactggagaggagggggtgcgatctcagctcactgcaatctccgcctcccaggaatgaaccaatatggatacatttttagtaactaaagtccattcttcattcagtttcttcagctttcccttaatgccctgtttctgtcccaggatcccatgcaggatttcacatttatttatttgagacagagtctcactctgtcacccaacctggagtgcaatggcgtgatcttggctccctgcaacctccacctcccaggttcaagcaattctccagccttagcctctcagttcctgagaaactgtcccagttgaatggaaggagaagtgatgactaaatgtcatgtgaggccgggtgtggtggctcacgcctgtaatcccagcactttggtaggtggagatgggcggatcacctgaggtcaggagttcgagaccagcctggccaacatggtgaaaccccgtctctactaaaaagacaaaaattagccaggcttggtggtgtgtgcctgtaatcccagctactcaggaggctgaggcaggagaatcacttgaacccaagatgcagaggttgcagtgagcccagatctcgccacagcactgcagcctgggtgacagaatgagactttgtctcaaaaaaaaaaaaatagccaggtgtggtggcacccacctgtagtcccacctactcaggaggctgaggtgggaggattgcttgagcctaggaggtggaggctgcagtgagctgtgatcgcaccactgcactccagtctgggcaacacagcaagactgtgtctcaaaataaataaataaataaaagtacatactaacaacataatttctgactgtcaaggttgtctttgactgtctgctggagtagtgtgttaggtttctccactgtaaagttattcttttttttcctctttcctccttccatactgtgatctttggaaggaaggcaccccgtgtagcttacacctaaggattggagagttacgttccactccttgagggcagagcatctacatgaattatttgaaattcttctgcaggggaagaagtccctcatcccctattatgaaattatgtgctccttttttttttttttttttttttttgttgcccaggctgcagtgcacttatgcaaacacggctcactgcagccccaacctcccactcttaagcaatcctcccacctcagcctcctgaatagctgggattacaggtgtgcactgccacacccagctaatttctttaatttgttttatttttagtagagatggagtttcgctatgttgtaaaggctggtctggaactgctggcctcaagcgatcctcccgccttggcctctcaaactgctgggattacagacgtgagccaccatgcctggcctgctcatttcttgacatcagcatggactcacaaatattcattttatatttcggattataatcatccgacgtcattttttttttttttttgacagggtctctctctgtcacccaggctggagtacagtggtgcaatcatagctaactgcagtctcaaactcctgggctcaagggatcctcccgccttagcctcccaagcagctgggaccacaggcatgcaccgccatacctggctaatttttaaatgttttatttttcagcctgggcaacatggtgaaactccatctctactaaaaatacaaaaacttagccgggcatggtggcacgcacctgcactcccagctaatcaggagtctgaggcacgagaatcatgtgaacacaggaggtggaggttacaatgagttgagatcttgtcaccacacttcagcctgggtaacagagtgagacttcacctcaaaataaataaatacataaatacataaataaaaatttaaaaaaaaagaatggggccgtgtgtggtggcttacacctgtaatcccagcactttgggaggctgaggcgggcggatcacctgaggtcatgagttcaagaccagcctggccaaaatgttgaaaccccatttctactaaaaatacaaaaattagccaggcatggtggcgtgcgcctgcactcccaactactcgggaggttgaggcacgagaattgcttgaacatgggaggcagaggttgcagtcagctgagattgtgccactgcactccagcctgggtgacagagtgagactccatctcaaaaaaaaaaaaaatgaagaagtggtgctttaccagggagagtctgggcagcaaaacaccctccggcgtctcctggcattgctcctggctgcactccagggacagtgcccttccttgagcaccagcttggtccttccccagggcctttgtccttgccagttgctctgcccagaatgctcttctcccatctgcttcttttcatcgccccattccctgccctacctctccctcctcctcgaagaagcttgcccagacaactgccctagcaaaagcagctcccaccctgactgtcactagctcctttgctagactgtgtgattgtcccaatattttatccctaggtgaaatgatctttttcttttcttttttttttttttttgagacggagtctcgctctttcgcccaggctggagtccagtggcacgaacttggctcactgcaacctccgcttcccaggttcaagtgattctcttgcctcagcctcccaagtagctgggactacaggcgcgtgctaccacacctggctaatttttttgtattttcagtagagatggggtttcaccatgttagccaggatggtttccatctcctgaccttgtgatccacccgcctcggcctcccaaagtgctgggattataggcatgagccaccgcgcctggccatgaaatgatttctttcactcgtattagtctattgcatctaaatgcaactgtcatgaggcgcaaggacagggatggcctttggcatgcacaatatttgttttttgttttgttttgtttgttttttgagacggagtctcgctctgtgccccaggctggagtgcggtgcgcgatctcagcaaactgcaacctccgcctcctgggttcaagaaattctcctgcctcagcctcccaagtggctgggactacaggtgtacaccaccacgcctggctaatttttgtattttattttattttattttactgagacggagtctcgctctgttgcccaggctggggtgcaatggcatgatcttggctcactgcaacctccgcctcctgggttcaagcgatttccagctaatttttgtcttttaagtagagacgaggtttcagcaagttggccaggctggtcttgaactcctgatctcaagtgatccgtccacctcgacctcccaaagtggctaggattacaggcgtgagctagcacgcccagcctaatttttgtattttagtagagacagggtttcaccatgatggccaggctggtcatgaactcctgacctcaagtaatccgcttgcctcagcctcccagagtgctgggattacaggtgtgagccaccgtgcccagaatgttggttttttgttttgtttttgtttttgagataggatcttgctctgttgcccaggctggagttcagtggcatgatcacaactcgcgtcactgcaacctccacctcccaggctcaagggatgctcctgcctcagcctcccaagtagctggaactacaggttcaagccaccatacccagctaattttttgtattgtttacagaaatggggtttttccatgttgcccaggttggtctcgcactgctgggctcaagtgatctaccgcctcggcctcccaaagtgctgggactacaagcatgcaccaccccgcccggctaatttttgtattttgtgtgtgtgtgtggagacaggatctcactgtgtggcccaggttgttgtcaaactcctgggctcaagcaatctgcccacctcagcctcccaaagtgccgagattacaggcgtgtgccaccatgcccagtcaatattgttcttaaaaattattttgaggctgggcatggtggctgggcatggtggctcacacctgtaatccaggcactttgggaagccgaggtggaaggatcgcttgaggccaggtgtttgaaactagcctgggcaacatagccagacccatctctacaaaatattttttaaattagcagggtgtggtggtgcacacctgtagtcctagctactcaggaggctgagacaggaggatcgcttgagcccacgagttccagcctacagcgaactatgattgcgccactgcactccagcctgggcatcagagcgataccctatttctacaaatatatatataacatatatacatatatagcatataatatttacatatatataacataatatttacagatatatatatacacacacactatatataaataattcttttgaaatattttggacatgtccccctgaggtacctggggagtgctgataataaactccatactggccaggcacggtggctcacgcctgtaatcccagcactttgggaggccgaggtgggcgaatcactttaggtcaggacttcgagaccagcttggccaacatagtgacaccccatctctactaaaaatacaaaaattagccgggcgaggtggcaggtgcctgtaatcccagctactccggaggtggcacgatctcagctcactgcaacctccgcctaccaggctcaagtcatcttcctgccttagcctcccgagtagctgggattacaggtgcccagcaccacacccagttaatttttgtatttttagtggagagggggtttcgccatgttgcccacgctgctcttgaactcctgacctcaagtgatccacccgcctcagcctcccaaagtactgggattacaggcatgcgccactgtgcccgtcctgaaggtcatagacattgagagaagggtgaaccagcctcatactggaagggctgcaaagtggctcagctggtggaccctagatccggtgacttggggctcaaagcctccttctattctccttggtgtatgactcagtttttccatctgtaaaatgggtacaatcctcattatgctggtgttggcgtgaggattaatgagacgatgtcgggcatataacactctcagaaattgtcatctatgagtctgatccctgaagtgcacacacaggtagaattttgcagatgattttatggggtttcacatactcccccaaaccaaatcctgaactcctgacctataaaccctctaagtcatccccacccccagcttaataaccaggctctgtctaatgagttaggaggtgtaagagcccaaagagctccaggtgtgggaggaggcgggaggctggaggggggctcggggaggggctgccccatgcacacagggcagccagtgtgtctgaggctgcctaggccgtaggaacaggcccccaggggcaggtgggatcttgattccagcctgcagtgtgtgggtggggcagtctagaccagccaggctttccagtccgcccagtgtgggggttgggccagtggaggcccctggaggcagggacaggagcacttgacctgcaccaacacctctggacctggacggccccccacccatccttcccaaactgcagccccctcccgggatgggaagctgaacccgtgtatccaccccacatctccccggattgtgtgtgagcatgctgcatttgctgcctttgctgggtttgtccttggggtccacggaggtcatgggaaccatcccaggaaaagcaaacccacgtgtgagccggcaggacacgccaagctcacagaggggcaggttatggcagaagcaccctttcctgctggaaatgcttccccgggccaggaaccccaggtctccagatggggaaactgaggtccagtggggaaaagaccttgtttaggtccttcgaggggactgggacaggagccggggcatgcgtcatccacatcagcacctgtgctcacacacacagacactggcccctttgcgcacccacacccactcctgcacgggcacatccagacaggagggcccacgccccagctcccctccctcggcacacccacccccatgcctgctcacatgctccggaccatgagacccacgccccaaacacacgtgccatttcaacaaagagctagctctggggccaccatccggggtcaagggtcttggagaccaccttgccacagcgtctttccatttcatagcgttttgtttttgtttttttttatgagacggagtttttttgctctcattgcccaggctggagtgcaatggtgcgattttggctcaccgcaacctccacctcccaggttcaagcgattctcctgcctcagcctcctgaatagctgggattacaggcatgcgacaccatgcctggctaattttgtgtttttagtagagatggggtttctcaatgttggtcaggttggtcttgaactccagacctcaggtgatctgcccaccttggcctcccaaagtgttggaatttatttatttatttatttatttatttttttttttgagacggagtttcgctcttgttgcccaggctggagtgcagtggtgcaatctcagctcaccgcaatctctgccttctggtttcaagcaattctcctgcctcagccccccaagtagctgggattacaggcatgcaccaccacctctggctaattttttttttatttttagtagagatgggtttctccatgttggtcaggctggtcttgaactccggacctcaggtgatccgcccacctcagcctcccaaggtgctgggattacaggcgtgagccactgggcccggtcttttttttttttttttctttttgagatggagtcctgctctttcgcccaggctaaagtgcagtggcacgatctcagctcactgcaacctctgcctcctgggttcaagcaattcttctgcctcagcctcctgagtagctgggatcacaggcgccagccaccacacacagggaatttttgtatttttagtagagatggggtttcacaatgttggccaggctggtctcgaattcctgacctcaggtgatgcacctgcctcagcctcccaaagtgctgggattacaggagtgagccactgtgcccggcctgtatgttatctttttacgtatcactttctgagtgcatttgtgtgcatgaagctgacatttacatttgtgtgaatttgtgaatatttgtgtgagtctgtgagcacttattcctgttcacaaggtgacaaggtgcctatgtatgtgtgtgtgtgtgtgtgtgttctgaaagtaacacacgtttttcttttcttttttttttttttttgagacagagtctggctctgtcacccaggctggagtgcagtggcaagatctcagctcacttcaacctctgcctcctgggttcaagcgcttctcctgcctcagcctcccaagtagctgggattacaggcatgtgccaccatgcctggctaatttttgtatttttagtagagacagggtttcaccatgttggtcaggctggtcttgaactcctgacttcaagtgatccacctgcctcggcctcccaaagtgctgggattacaggcttcagccaccgtgcctggccgaaagtaacacacttttctttccaggcctgtaaagaacgaactcacacaaacacttgtgcattcacaattatatacagctaagaggcatgcaggggatattttgacaaaaatacaatggagggccaagcacagtggcacatgcctgtaatcccagcactttgggaggccgaggtgggaggatcccttgagcctaggagtttgagatcagcctgggcaatataaggagatcccatctctacacaaaacaaaaaattagccagggatggtggctgcagtgagccatgattgtgccactgcactcaagcctggggtgacagagtgagatcctgtccaaaaaaaaaataaaacaacaacaacaaaacaaacaatagaacaaaagcaaatattaaaatattaaaaacatccggctgggcgcggtggctcatgcctgtaatcccagcactttgggaggccgaggcgggtggatcacctgaggtcaggagatcaagaccatcctgactaacacaatgaaaccccgtctctactaaaaatacaaaatattagctgggcatggtggccggcgcctgtagttccagctactggggaggctaaggcaggagaatggcgcgaacccgggaggcggagcttgcagtgagctaagattgcaccactgcactccagcctgggtgacagagcgagactcggtctcaaaaaaaaaaaaaaaaacaaacagaaaaaaaaaaaccaaaaatccacaaatcggtgcttagaccttacaaataaacacacaattgcactcatgtacacaaatatttgtactcaacgcgttcacacacacttccatacttacagacacaatcagattcatacacagaaatacatttgcttacacagatatgaattcctagataaatatgcacatttgaactctcacaaaagcattcagacacaggcattcttttttttttttttaatgtgacggagtctcactctgtcgcccatgctggagtacagtggtgcaatcctagcttgctgcaacctctgcctcctgggttcaagcgattctcctgcctcagcctcccaagtagctgcaattataggtgtgggcaaccacgcccggctaacttttgtatttttagtagagatggggtttcaccatgttggccaggctggttttgaactcctgacctcaggtgatccacccgcctcagcctcccaaagcactgggattacaggcatgagccactgcacccagcagaaacaggcattcttgcacaggtatacctgctttcatgcctacacaatctgtcacaggcacccaccatatattcaaatccacaaagatactcacatataaacacacatatatgcacaaaaatatagtcaggaactgctcatcataaatcacacatctgctgggcgcggtgcctcaagcctgtaatcccagcacttcaggaggccgagttgggcggatcacgaggtcaggagatcgagaccatcctggctaacatggtgaaacccggtctctacttaaaaaaaaatacaaaaaaccagccgggcgtggtggcgggtgcctgtagtcccagctactcgggaggctgaggcaggagaatggcatgaacccaggaggcagagcttgcagtgagccaagatcgcaccactgcactccagcctgagcgatagagcgagactccgtctcaaaaaatcaatcaatcaatcaatcacacatccatgtgcatatagccagattcacatactcaaatacaaacccacttagacacacagcctcacctccacacagagccttctcccagcacacactgcagataccagaataatacacaaagacacttgcaaatacacccagtacagctacgcaaggacactcatagacacaaatagtcacactcttgcagaaatatacacactttttttttttttttgagacagggtctcactctgttggccaagctggagtgcagtggcactatctcagcttctgcctccctggttcaagcgattctcccgcctcagcctcccgagtacttgggattacaggcatgcaccattatgcccggctaatttttaaaaattttatttttagtagagacggggttttgctatgttggccaggctactcttgaactcctggcctcaagtgatctgcccgccttggcctcccaaagtgctgggattacactcgtggccaccgctctcggcctgaaatacacacactctcaatgtctctccatactcctgcattgacagaggcatcaataacagcctcatacaacacaccagtacgttcagatgcacagagatagacatactcacagcactccaaaaacacacacacagccgggcacggtggctgccgcctgtaatcccagcactttgggaggctgaggcgggtgatcacctgaggtcaggagtttgagactagcctggctaacatggtgaaaccccaactctactaaaaatacaaaaattagccgggagtggtggcgcaaccccgtaatcccagctactcgggaggctgaggcaggagaatcgcttgagcctgggaggcggaggttgcagtgagtcgagatcgcgccactgcactccagcctgggagacagagtgagtgagaccctgtctcaaaaacaaaaacaaaaacaaaaacaaaaaacagacacacactcatcacttccatccatcctcaggatacagacatctatataatacatatccttgtacacacaacaaattaaacacacacttacacgtgcccagatacataccccacacacacacacccctagacaccccccaatacacttggtcaccacccaaatgtattcagagatacacagatacgaagacactcatattcttgtgccttcactaacataatcagaaacaggtgcacccaaccactctctgcctgagggccggcgtttattgcaagcacttgcaggagctcctacgcctaagggtagacactggggctggcacacacagagggtccctaatcctttccagtaagctaggcgcgcgcgcacacactcacacacgcgcgcgcgcacacatacacactcagtcctccgcaagctccctccaccatcgccgcagtccaggccgcccccctccgccccgcccctgctgctccgtgcacactgcagtgaggggcccgggcggggcgcaggggcgcgccagggtccgggtccgggttcgggggcggggcgcacctgggctcctccccggggcgggcccgacgcagcgtcgccagcgcaagcggccgcacctggctcagcagcggcggcggcggcggcggcggcagcggcggtagcagcagcgggcccggctggggcgcgagcgcggcgcagcccagcccagcccagtccgagcgcggacccggcgcccgcagccccggcgccgccatggtggaggcggcgccccccgggcccgggccgctgcggaggacctttctagtgcccgagatcaagtcgctggaccagtacgatttctcgcgggccaaggcggcggccagcctggcgtgggtgctgcgggccgcgttcgggggcgcaggtaccggggctcgggggaccggggtcgggggcggcgggccgggcgcggcaggtgctgggggggggcggggcgccgggccgggaaggcagggggccgtgggaacaatagcgccggccgccgggggtccccgggctcgggcccctgccgcgccggggcctccgagcttcctgctcggcccgggcggtggactttgccccgccggctgcgggagcgcggtgggggtggggcccgcggcccagctccgcgcgggggtccccggcgtccaagcctccaggtgagccgggcggggtctgcgggccgggtggggtctccccgtgcggacctctcgttcccgcctcccgcacccccaaggccttcccttgcacgccttcttctcttttacacacatcacgcccctgcgaggatctcctctcggtctcttcccccgccacacaccctggagacccagaccccgacctcgctggggggtctcgagcgctccggtctccaccaccgcacgacccccaggccccaacacacaccccgcgtcggccctggccgcgctgcgggcggcgaccggggagctctgggaaccccctttcgcctccatagccccctccagcgcctggcagctgcgacttatggccccattttactggggaggttggcgagcccagctgaagggaaatgggtagtacaagatcgcctggggtgggccccccgctcctcccggctgcggggccttctcccattagagcagatccttcactccctcccccaggcccgcttgcctgagagcccgagccaccctaatggggaggatgccgtaatcccgggtccccgggattagaggccctggaaacactcagtctcggctttgggcagcttcacaaccccaggccagagctaggagtcagggcctggccagagaagacaggggttaattaaggtctgggctttccagcggggagctgtgggggtacatccttttctcccactggttctgcccactggtgttggcacagcccatcccccctctccctggccttcccagatcaacctgttctgggtgtgggtctcagtgacagctgtccgtctcctggttccgccccagcctgtccctctttctcccagacagtctctgtctgcgtcgttccatgcatgcatttcccactctggggtctacctccctgcagatatttgcttgaggaagaaagagattgggcattggacagccaggacagccccagctcctcacttccaaggttaccaggctgtagagaactcaacgtggagtgtcagaattgaatgtgaagtccagctgcaccagaatgcgaattatcccaattatctgagcttctgtttccccttctataaaagaaggcgttcattcacagacttatctgttttgcgaatgtttgtggggcaggggcacttgctatgtgtagggcactgctccagtgatggagaccccccgttacctctttgcaaggttgctgggaggcgtaaaagctgtagtgaccacagaattcttcgcgtggcacggggcgcgtgatacatgcgaaacggttgctcgctgctggtgtgattggcggtggtatattttgatgaataatattaacgttatccattatcccctggccaggaatcagagtagaaattatcccattttgaagacagcaaagcaaacttctgatgaggggtgttggtgagctcccagtgccctgactcacccagttctgttcttgttgacccagctccctctgctgtgtgacacacggcagtggctgcctctaccgtgagggtcaagttcaatctgttccctgttccactcccctaaaaagaggagaagggctgaaggaaatgggagcagagttctacaagattcatgagctctggggactcttgacggtatgatacctatcaggtgctgggctgggcgctcagggtgtagaggagacggcaggggatggatatggggcagagggggatgggcaggaaaccagatcatagggaagctggccagcggggcctggggaaagaaattcttgaaatcttccagggagggaagagatcccacaggtggaaagatttgagtctggaaggatgcatggaagtttgacacggagaagagatgtgtgggcagtgggcaaaggctcggagtgtggaccagcagggagttctcagagaataagatgcaggtccccggggtggcggtgggagataagggaggctggtcagactgaggaaggcccttcaggcccctggttatggatccaagggtactggggagccacggacagtgttgggaactgacaagatcaggtatgcagtggccccgtgggagtagtgatggctcagaggaagggatagttctggcaactccaaggcacaggtgtgagaaggctgtgcagaaataaaagcagaacacaagcttggagattagataagaaagggttccaagcctggccaacacgatgaatccccgtctctactaaaaatccaaaaattagccgggaatgatggcacacgtctgtagtcccagctacttgggaggctgaggcaggagaattgttgaacctgtgaggcggaggttgcagtgagccgagattgcaccactgcactccagcctgggtgaaagagagagactctgtctcaaaaaacaaagggttccatgttaaacacatttggaaaacaccccatgcagttctttatgccttcagaacagatgtgtgatgtgtgagggaaactcaagttcatgttggacatttttatcctggacaagttatctcagctctccaggccttggttttctcatctgtacaaggggtataataataagtgtcgtaaggattaaatgactggatgcagggaaggtcatggtataaataaatggttgggtgtggtggcatgggcttgtagtcccagctactcaggaggctgaggcaggaggattgcctgagcccaggagttccagggtacagtcagctatgatcacgccactgcactccagcctgggcaacagagtgagatcctgtctcaatcagccttccatccatccatccacccatccatctacccactcatccatccatccacccacccattcattcatccatccatccacccacccacctacccactgcactcatccatccacccacccaccccactcatccatccacccaccccactcatccatccacccacgcactcatccatccacccatccatccacccactcatccatccatccacccatccatccacccattcattcatccatccatccatccacccacctacccactgcactcatccatccacccacccacccacccaccccactcatccatccacccacgcactcatccatccacccatccatccacccactcatccatccttccacccacccattcattcatccatccatccatccatccatccatccatccacccacccacctactcaccgcactcatccatccacccaccccactcatccatccacccacccacccaccccactcatccatccacccaccccactcatccatccacccacgcactcatccacccacacactcatccatccacccaccccactcatccatccaaccacgcactcatccatccacccactcatccacccgcccatccatccacccgcccatccatccacccacccacccacccatccacccacccacctacccacccacacactctcccacccacccatccacctatccacccatccatccacccacccatccacccatccatccatccacccacccaccaactcatccacctacccacccacccactcatccacccacccacccatccacccatccatccacccgcccactcatccatccacccgcccactcatccatccacccgcccactcatccatccacccgcccatccatccatccacccacccatccatccacctacccacactcccacccagccatccacccacccaccctcccacccatccacccacccaccctcccacccatccacccacccacccatctacccatccgtccgtccatccacccacccacccatctatccttccacccacccacccacccactcatccatccacccatccacccacccactcatccatccacccacccacccactctcccaccctcgcacccacccaccaactcatccacccacccacccactcatccacccacccacccatccacccatccgtccacccgcccactcatccatgcacccgccgactcatccatccacccgcccatccatccatccacccacccacccaccccctcatccatccacccaccctcccaccgtcccacccatccacctatccacccatccacccacccactcgtctacccatccatccatccacccacccaccccccatccatccacccacacacccacccactcatccatccaccaacccacccactcatccactcatccatccacccacccacttatccatccacccacccactcatccactcatccatccacccacccactcatccatccacccacccatccacccacccttccatccacccatccatccacccacccacccatcctcccacccttccacccacccacccatccacttatccacccatccacccacccacccatctacccatccatctatctgtccatccacctacccattcatccatccatccatccacccacccattcatccatttatccatccatccatccatccacccacccattcatccatttatccatccatccatccattcacccacccattcatccatttatccatccatccatccatccatcctagctatgttgtagacctgtgctattcaatatggtggccaccagccagatgtggctactgagtcacttgaaatgtggttgatcagaaccaagatgtgctgtaaatgtaaaatatactcagggttccaaagacttggtccaaaaacaaacaacaaaaaccagtgtaaaatatcttatgaataatatttttatgttgattacatgttaaaataagagtgggatatgtcttgggtcaatgaaatatattactaaattcttattgtttctacatatgtaatgtggcttctaggaaacttgacggctcattgggctcacattatacgcattatatttcttttttttttctttttgagacagcatcttgctctgtggcccaggctggagtgccggggcacaatctcggctcaccacagcctccgtctcctgggttcaagtgattctcgtgcctcagcctcctgagtagctgggattacagacatgcgccaccacgcccagctaatttttgtatttttagtagaggtggggtttcaccatgttggccagtctgggcacattgtatttctatcagacagcagtgttctgctgtaaataatgctcagtaaacattttagccaggtgtggtagcacatgcctgtagtcccagctactcaggaggctgaggtgggagggtcccttgaactcaggagttcaagaccagcctgagcaacatagtgagaccccatctctaaaataaaataaaataaaataaaataaaataaaataaaataaatgaataaataaaataaaaagaaagtggggccaggtgtggtggctcatgcctgtaatcccagcactttgggaggctaaggtgggtgggttgcttgaggtcagggtttgagaccagcctggtcaacgtggtgaaaccccatctctactaaaaatacaaaaagtagccgggcatggtggtgcacgcctgtagtcccagctacttgggaggctgaagcaggagaatagcttgaacttgggaagcagaggtcgcagtgagccgagatggcaccactgcactccagcctgggtgacagagcaagattgtctcaaaaaaaaaaggaaagaaaaatagaataagtttatagtataaggcagtggttctcaactggtgatgattttgacacttaattgacatttggcagtgtctggggacatttgtggttgtcattacttgggaggaatgtactactgacgtctagtaaatacagaccagagattttgctaaacatctcacagtgtacaggacaggacagcatcccctgaatacaaagaattttccagccccaagtaccaatgaaccaaggtggaagaacatcggtgtataataagtgtctgataaatgtcagtgtagccctagcttaaggttttggtgttttttgtttcttgtttttcatcttaaaggccctgaaaagtcctgtaggaaagaaacacgtgtgattttgctggtgggagcaagacgtgcccaaggccggggctggggaggtagagaggagggtttggatttgggagatatcaggaagttgaaagccaaggacgcattaaatgtggggtgagggcgtaaagaaagggagggagggtgatttctcactgccttgggggcagggaggaggggaggtgtgggtgagatgttgagaattgtgggagatgcccagggtgcagtggggcccgtggcagccgctgttgcagtcttcaggtggccctggaagccgtcacggggtagggtggcctggggtgggggtggggcatgtccatttacaaggagacgcctgtgggaggaaggtttctggaagaaggaggcactgggcacagagcccaggcgagatacgggcccacagatatgctttggaggtccctgctggccttggggagaccggaagccatgagggcagcatcgagctcagggaaattgagggagaggtggaggggggctgggagggcagggaggaagtgagcctgaaatacctcttctttcaaggagccaagatgagaggggcaaaaagaaggtccaagtctacatgcgggtggcgcgttaagtgggacggtccagtgtggttttagaaggtgggaaaggagccaggacagggagggacagaaggcagccaagagtgcctgggtcctcacaggtggagaagtcccgttcaaatatgttctgaagcactagaaccccttaccctgttctttcttttctttttttttctttctttcttttttttttttttaagacagaggcttgctctatcacccaggctggagtgcagtggcgcaatctcagctggctgcaacctctgcctcccagatttaagcgattctccggcctcggcttcccgagtagctgggattataggcgtgtgccaccatgcccagctcatttttgtatttttagtagagatggggtttcaccatgttgacaaggctggtcttgaactcctgaccttaaaagatctgcctaccttgttttcccaaagtgctgggattacaggcatgagtcactgcacccggcccccaccccgttctttcaaacacacacacagaaccccaatatacaaaacaagtctgggcacagtggcttacccctataatcccagcactttgggaagccaaggcaggtggatcacttgaggccaggaaattcgaaaccagcctgagcaacatggtgaggcttccatctttataaaaaaatttaaaaattggctgggtgtggtggcacgtgcctgcggtcccagctactcaggaggctgaggcagggaggatcccttgagcccagagttcaggttgcagtgagccatgatcgtgccactgcactccagcaaaaactcaaacaaacagagaaggctgtgcaggctgggcgtggtggctcacgcctgtaatcccagcactttgggaggccaaggtgagcagatcgcttgaggtcaggagttcaagaccagcctggccaaaatggtgataaccctgtttctacaacatacaaaaattagccgggtatggcagcatcgcacctgtaatcccagctacttgggagtctgaggcaggagaatcattcgagcccgggaggcagaggttgcagtgagccaagattgcaccactgccctccagcctgggcgacagagagactcttatctccaaaaaaccgcaaaagctgtgcagattagaacaagagctggacagattccctgctgttgatttcagtcacctcttccccgacccctgccaagccttcctggccttctcctctccactcttggtcctacgtggatttctgcccccagcccactgtccacctggggcttcctcacgcctcttcccattgtcctatttagggacctcaggctgtctctatgatgtgacctcaccatctctctaagccccagcctttcacataatctgcctcaaggatgtcctcaaagcccctcacattcaatttcaccccttcacctcccattcctcctgcacccaagctcagtcattacccctctcttccctcttccccctcagacccagcaaggtcctggctacctccctctctgtcccttgcctcctcccttcaatcaccaggtttacatcactcaactccctcgatgtgcctgtggtgtgcccacctcccctgctcgcctgtgtgccccccactcatccccccctgcctgcaagctaagagagggcgtccagtttgctgggtctaaccccagtcctggtgttgaagagttatttggcctggggcaagggactttccttctctgtgcctcagtttcctcctctgtaacatgggggttgccaattgggccctggctgcctcctagcgttgatgtaaggctcagtgagtctacattggcaagagcaggaaggctcttaggattgccgatgttattgtctttcctgggacctacaagagccagtccagctggcctggtattgggggtagcctcccctcctttccactctaagtgcccatcagctccctgaggcaccgtgttctctcccacctgctgggctttgcatctgcaggcccctctgcctacaacgccatcaccccttcctccagcaaactcctgcacatctgcactctcagcccagatcccctttctcctttcccaatgccatcctccctggtccagacacactcttaatccgggccatgtggtgtgtgtgtgtgtgtgtgtgtgtgtgtgttgtatctggtgaccctgacccccgtgtttcccctctatgcccccacagagcacgtgcccccggagctgtgggagcccttctataccgaccagtacgcgcaggagcatgtgaagcccccggtgacacggctgctgctctcagccgagctctactgcagagcctggcgccaggcactgccacagcttgaaacaccccccaacccctctgcactgctggccctgctggcgcggaggggcacagtgcctgctttgcccgagcgcccggtgcgcgaggccgacctgaggcaccagcccattctcatggtaggccccgccactgcctgttagaccacgcctaccatgctcagctcctcccctcaagctcctcccgccagtcctggctcctcccaagttccctctatcagtcttggctcctttcaagctttgtcgattaagcctagctcctcccatcaggcttggctcctcccccaggttcctcccaccaggcctggctcctcccctcaagcgctattaagcctagttcctcccacgaggtctggctcctcccctcaagcgctatccattaagcctagctcctatcagtcttggctccttcccttaagctatgtccatcaaacctagctcctcctatcatcagtcttggctctgtcccttaagctctgtccatcaaacctagctcctcccaccagtccaggctcctcccctcaagctctgttcattaagcctagctcttccccccagccctggctcctcccctcaagctcttcccatcaagcctggcccctcccatcaaacccagctccccaaaaaggcgctactctggcccttgaggatttgtgtacacagcccaccctatcctaacgcctagcatctgacctcaaagtcccacccatcgtgcgtggcttttccgggaccccatttcttgttccttcccttaaggccccacccatgaaccactggccccgccccctcaagccccaccccccccgtcaagtccctcccatctgcaggttcttccttttcccaggcccttgggggccgaggtgcgcctcctgcagctctcaggtctcaccctctagcgcttgcccccacagggagcccacctagctgtcattgatgccctcatggctgcctttgccttcgagtggacaaagaccctgccaggtcccttggccctgaccagcttggagcacaagctgcttttctgggtggacacggtaggtggggttgggcctggggtgggttcggggaccagcatcgtccagtggccagaccactgaccccctccctgccctccagaccgtccggcggctgcaggagaagaccgagcaggaagcggcccagcgagcctctccagcagcccctgcagacggggcggccccggcgcagccctcggtgaggccagggcatagaaccgtcagaaggatgggggaccggagatctgggagggcagggctgtgcttcctggacactcctgaagtggggagggggctagaggtgacacactctctctttcttcccccctctctcaatctctctgtgccctgcccgtcccctgtgccggtacccgctgccctcctctctgcctctctggcctcagtgccctacgcgctggtactggaagctggttcctgtaagtggggctgtctgtccgccccgtctgcctgccctgcttgtagctctgtctgtctgtatgtctgtttctgcctgcctgtctgcgcgccctctcatacctccccaagctgtgagcaaaggaggttggaccccagtcctgggagacagggagaacccctctgtgaaccaagagaagggtagaatctcggccattaactgagagggcagacccctcccccagcgaactgatgggtggggacgaacttcccctcccgttattcagaagggcaagccctccccgttcccattaatgaagagggtgggaccccctgaacctgtcccccttagccgaggtggggagaccacataaatttctgaaggggggacctgcagcccatcacaaacgtggatcctgaccctagcaggcagggcaccctctggccaaggggaagaccctccaatgcagaagaagatagaataactttcctaactgagacccccagcttccctagagaaaaatcccagctttgaaaaggaggaggaggcccatccctgaagctggaagttgaaatttctctcttccctgaatgagctgtgtgaccttgcagaagtatctaaacctctctgtgcttcatataaattactcccatagtagataaacaaggaggaagtgggggaggttttgggctggctggcgtccccacctttgctcactccttcccccaccctggggcctgggttgggaggttcccttcctgcctacccgcttcctctgcatcctctccccaagctgggggcctgggtcttttgtgggaggaggattccccgcataagagggggttcctactctgtggggtcccttggggctgggaggagctggggttcgcgaagccggccagagcagtcagggagctggacggccggggctcaggaccagggtcagggctaccccctcccccccaaggtgggcttgggggcccagcaggtcagcacccctcccccttgctgatggctgctcctctccccccagcacgcaattgccttctgtttgaaggagtcggggagcaaaccccccatggtaatgtatcccccgccccggggtcccaggagtccctgtccccagcccccgctgctggcctggctgctcgaagacatctcctctgcctcttgctgctgcccctcccctgctccaggctggccccccaactctgtctctgggacccccagcttcccgccccctcatggcggaaaccccaggcctccctgcccagcctgcatgaccgctgaccctgggggccagcctggccactcacctgacctggctcccatctgcagatccgataccgcaaggaccgtgtggtggcgcgacgtgccccctgcttcccgacggtgaccagcctccaggacctggccagtggggccgcgctggccgccaccatccactgctattgtccccagctgcttcgacttgagggtgagtaaatggatgtggaacagatcttgtgccggggagctgggcatcctaagtcccagcccctagaccctccatccccaggtccgcgagaccagcaacgatgcagtggtcatgagggcagcttccggaactggcaggcctgagtttgtgtctctctcttccccaatgagctttgtgacctcacacaagtatataaacctctctgtgcttccaggagttcattcctgcagcagatgaaacgtatggagtgtggactgtgtgccagaccttgttttaggcactggggatccagccagaatagagacacactccccacttcacagacggctctagctgggagagaaagatactaagtttatccaaaagtacttttttttttttttttttgagacgggagtcttgctctgttgcccaggctggagtgtaatggcatgatctcggctcactgcaacctccacctcccaggttcaagccattctcctgcctcagcctcctgagtagctgggactacagccacacgccaccacgcctggctaatttttgtatttttagtagagacgggtttcaccgtgttggccaggctggtgtcgaattcctgacctcaagtgatctgcctaccttggcctccctaagtgctgggattgcaagtgtgaaccactgcacccggcccagaagtactttttgcatactgggtagtcctaaaggcaatgggtggtcagaaaaagctttttttaaaaaaactcttttttcttttttattaaaaaaaaaattatagggctgggtgtggtggctcacgcctgtaatcccagcagtttgggaggccgaggcgggtggatcacgaggtcacgagttcaagaccagcctggccaggatggtgaaaccgtctctactaaaaatacagaaattagccgggtgcggtggcgggcgcctgtaatcccagctacacaggaggctgaggcaggagaatcgcttgaacccaggaagtggaggttgcagtgagtcaagaccatgccattgcactctagcctgggcaacagagcgagactccatctcaaaaaaaaaaaaaaaaaagtataaaatagagatggggtcttgctatgttgcccaagctggtcttgaatccctgggctcaaacatcctcccacctcagcctccccaagtgctaagattacaggtgtgagccaccacacctggcccggaaaagctttttgagctgaggtcttgggggagagtgttctagaaagatgcaaaggcctaaggcaatagtcaccaactttttggctccagggaccggttttgtggaagacaatttttccacagatggaggcagggaggtggtcttgggataattcaagcacgttaatctttattatgtactttatatctaatacgttgtaacatagaatgaaataattctacaactcatcatcatggggaaccagtgggagccctgagcttgttcctgcaactagacggtcccagctgggggtgatgagagacagtgacagatcatcaggcattcgattttcataaggagggtgcaacctagatccctcacacgccaggttcacaatagggttcgcgctcctgtaagaatcgaatgccgccgctgatctgacggaagcggggttcgggtggtcctgcaagtgacggggagcggctgtaaatacactcactgcagctcacctgctgtacggttcagttcctgacaggccacgccccgggggttaaggacccccggcctaaggacggtctatcatataattcacctcggccgggtacagtggctcacgcctgtaatcccagcactttgggtggctgaggcggccggatcatgaagtcaggagatcgagaccatcctggctaacacggtgaaaccccatctctactaaaaccacaaaaaattagcctggtgttgtggcacactcctgtaatcccagctactcaggaggctgaggtgggagaatcacttgaacccgggaggcagaggttgcagtgagctgggattgcgccactgcactacagcctgggtgacagagcgagactccatctcaaaaaaaaaaaaaaaagaattcacctctcgaagggcacctggcagaagctgggctcataggaggtcttccgtgtgtgggggactgctggtccctggcttccctggggccccatcctcctcctcatagagttggggacccactcctcctgtccccacagaggtgtgcttgaaggaccccatgtctgtggcggacagcctgtacaacctccagctcgtgcaggatttctgtgcctctcgccttcctcgtggctgccccctgtcccttgaggacttgctgtacgtcccaccgccactcaaggtaaggccatcctggggcctcctgggccgaggcgggcatctggggccaggggtcccgtctgctgacccggcctcccacctccaggtcaacttggtggtgatgctggccgagttgttcatgtgttttgaggtgctcaagcccgactttgtgcaagtgaaggacttgcccgatggtcacggtgaggccctgggggcctgggggccgggtcgggggcgggtgggagagccaaacccccgcctgaccctcttctctgtactgcagctgcctccccccggggcactgaggcctccccacctcagaacaacagcggcagtaggtacgctccccacactgggcgagtctctggcattgtgggtgtggggctccatgtctgccttgctgagcactgggacgcagctgggtgatgctgttgtctccccccggggagaggcggaggaggaggtgggggtcctgaggctgaagtacgtctctccgtacagttctcctgtcttcaccttccgccacccgcttctgtcatctggtggcccccagtccccactccgaggatccacaggtgaggagggggtaggtggcttctgtcacgggggacccccccactcacagactgccccagtgggcctcatgttgtctcctcgtgagccttccaatagcctctccatcagatcccccttgggcatcccaaagtgacccccagaatggcctccccagtggccccacagtaccccgtagtgacagtaaatggccccgggtatctgtttctggaaacctctggtctcactagaccacataatgagccatcagtgactcacccaatgaccttgcagaggttgtccccagatgctggctgaccccactcagggttcccagggtccccatagtgaccactcatcgcctcccccaggctccctgaagtcttccccgtccatgtcccatatggaggccctgggcaaggcctggaaccggcagctcaggtgagtagacctcacaggccagggtagggggtggagcaggctagggcgggttggggccgaggctggtcccaggggctgacccctccctccggccgcccagccgtcccctctcccaggctgtgtcattcagcaccccctttggcctggacagcgacgtggatgtcgtcatgggagaccctgtgctcctccgctctgtgagctcggacagcctgggccccccgcgtcccgcgccggccaggacccccacccagccacccccggagcctggtgacctgcccaccatcgaggaagctctgcagatcatccacagtgccgagccccggctcctcccagatggggcggccgacggcagcttctacctccactcccctgaggggccctccaagccatccctggcctccccctacctgcccgaggggacctccaaaccactgtccgacaggcccaccaaagcaccagtgtacatgccacaccccgagaccccctcgaaaccatctccctgtctggtgggggaggcatcgaaaccgccagccccatccgaggggtccccgaaggcggtggcttcgtccccagcagccaccaactccgaggtgaaaatgaccagctttgcagaacgcaagaaacagctggtgaaggcagaggctgaggccggagcggggtcccccacgtccactccggccccgccggaggccctgagctcggagatgagtgagctcagcgcccggctggaggagaaacgcagagccatcgaggctcagaagcgacggattgaggccatattcgccaagcaccgccagcggctgggcaaaagcgccttcctgcaggtgcagccgcgggaagcctctggggaggcggaagcagaggcggaggaggccgattccggtccagtccctggtggggagcggcccgcaggcgagggccagggtgagccaacctcacggcccaaggcagtgaccttctcgccagacctgggcccggtgccccacgaggggctgggggaatacaatcgagcggtcagcaagctgagtgccgccttgagctcgctgcagcgggacatgcagaggctcacggaccagcagcagcggctcctggccccgcccgaggcccccggatccgccccaccacctgctgcgtgggtcatccctggccccacgacggggcccaaagctgcatcccccagccccgcccggcgagtcccggccacccggcgcagccctgggcccgggcccagccagtcaccccgcagcccgaaacacacgcggccagcggagctgcggctggcacccttgaccagggtgcttacgccaccccacgacgtagacagcctcccccacctgcgcaagttctcgccgagccaggtgcccgtgcagacgcgctcttccatcctcctggcggaggagacgccccccgaggagccagccgcccggccgggcctcatcgagatcccgctgggcagcctggcagatcccgccgccgaggacgagggagacgggagccccgctggtgctgaggattccttggaggaggaggcgtcttcggagggggagccccgggtggggctggggttcttctacaaggtgagtccccgagcaggtggctggagggtcctgggcctggggcgggggcgggtgggggcggggggaggtggacaaacccactattggatgaatagggctttactgaaggatgggtgggcgggtgggggatagatggggagccaggtatgaatggacagaacaggtgtgagtggctgggtaaggcctccatgggtgggagaggggggaaagggacatttgcacggtggggggcaggtatgtggggtgacaggggcctcagatgggatttgaccctgtctgttgggtaaggacttccacaaggggctgtgggggtgcagtggggtgagaggtcctccccctgtggcttaatgagtgaggccctcgggtatgtttgggggtgaggggtttccagtgggggctgacccagtcatgtccctcccaaacaaggtatgggtggccggacaagggggatagatagatgtggggaggggtggagaaacagggaggagtcatggatagacagatggatgaatggctggttgcatgggtgggtgggtgatggacagatagacggacaggaccaggatcttcagcgcacctccttgctcatcctctccttcaccccctcgcccccagcacgctcctaccacccctttcctggccctgccctgtgtccactgtctctccattcccatggctttcccagccggggacacctagggttacctgactggcctctgctgcctgcctccatcccgggccattttgcactgagtggtcggggattttgactgctccccttacccttgcttttagaatgaaagtcctccccagggtggccgggcgcagtggctcatgcctgtaatcccagcactttgggaggccaaggcaggcggatcatgaggtcaggagatcgagaccatcctggctaacatggtgaaactccgtctctactaaaaatacaaaaaattagctggcgtggtggcgggcgcatgtagtcccagctactcaggaggctgaggcaggagaatggcgtgaacccaggaggtggagcttgcagtgggcctagatcgtgccactgcactccagcctgggcaacagagcgagactccatctcaaaaaaaaaaaaaaaaaaaaaaaagtgagcacagcccaaagccctggggaggacttccttttcattttttttttttgttttgttttcttttgttttttgttttttgagacagagtctcgctctgtggcccaggctggagtgcagtggcatgatctcggttcactgcaacctccacctcctgggtttaagtgattctcttgtctcaccctcctgagtagctgggactacaagagcatgccaccacgcccagctgatttttgcatttttagtagagacagggtttctccaggctggtctcgaacccctgacctcaagtgatccacctgccttggcctcccaaactgctgggattacaggtgtgagccaccgcgtctggcctgtactcacttctgacttagtcctgcgccactgtcctcagctctgtgtcccagccacactggcccccttgtacttccgtgccccccagtaggtttgctccagcctcagggcctcggcactagctgtcccctctgcctggaacgctctgctctgtacgcccacctagttaaatcctgatcattctacagggtacttcctctgggaagccttcctgggtgtctccaggccaggccggggtcctcccgcagtgtagagtgtctgtgcccaacacgagcttttgctggcactcactgctgtctgctgcttttgtcttccccgttgggttaagcagtgtgtgtgtgagcggcacccagtgtatcccatccctgttgtgtcccagtacttagtgtggggctgtgcatacagtaggcaccaactaagtgcatttagaacaatgatgaaaacaaaagcacaggtgggtggcgggcaggctgggtggagggaagatgggcctccagccatgttgggggagggggtggctggctggactcggcgtctgtccccaggatgaagacaagcctgaggacgagatggcccaaaagcgggccagcctgctggagcggcagcagcggcgagcagaggaggcgcggcggcgcaagcagtggcaggaggtggagaaggaacagcggagggaggaggccgcgaggtgaggccgggcctgcccgggacgcccgctccttggcctgtctgccaccgcggaccccgtgagcggttctgatgccgattccctgtgatctgcaggctggcccaagaggaggccccgggcccagccccgcttgtgtccgcagtcccgatggcgactccagcccctgctgcccgggctccagccgaggaggaggtgggcccccggaagggggacttcacgcggcaggagtacgagcgccgggcccagctgaagctgatggacgacctcgataaggtgctgcggccccgggctgcggggtccgggggtccaggtcggggcgggcggagggccacccggcctcgctcgggttgctgtgacgactcagccctggcacgaagcccagcccgcggcctgctgggtgaggacccttgggggacggggcctgcccagtgccctttccggggctcactgggtgaggcccccatgggtaaggggggagggggagggagatgtaagcaggggtgccgggagggggcgggtatgtggggtgacagggggcctcaggtggggttggacactgtctcttgggtaaagacttccatagggggccgggcgcggtggctcacgcctgtaatcccagcactttgggaggctgaggcgggcggatcacctgaggtcaggagtttgagaccagcctggccaacatggtgaaagcccatctctattaaaaatacaaaaattagccgggcatatggcatgcctgtagtcccagctacttgggagactgaggcaggagaatcgcttgagcctgggaggtggaggttgcggtgagccaagattgcaccactgtactccagcctgggcaacagagcgagactccgtctcagaaataagacaaaaaaaaaaaaaaaagacttccatagggatgtggggtgcagtgggatgaggggtctttcttctgtggcttcatggataggaacctttgggagtatgtttggggtgaggcgttgccagtaggggctgacccagtgctgctccccacttgcctgctgggcaaagcatcctccctcatagaggggtccccccataggggtgctgcagagggccgaggggtcttgggcaggactgactcctcctgtgttccccccacagcctgctggaccgggtgttgtggagggcaggggcttctggtgggcactgacctgcaatctctgtccccaggctctcggctgagcaaaatctattcccagtccaccctgtcactgtccactgtggccaacgaggcccacaataacctcggggtgaagaggcccacgtctcggtgagtttagcccgcacaggcggggttcgtatgccgggtggcttcccagagcctgggaggtgtgtgggcatctgggtgaacctagagggcggtatggctcgagtttatggatacgccatgaagagatggagggacgcgtgtgggcacgtgtgcatggggcatagtctgtacctggcagacaggactcaagcatgtgcctcagtgcacttgagtgccaggtgttcctgtgggaggaggacagcacggggcactgcatggacttgggagggtgtgcagtgtataccgcctcctctgcagtgtgtgtggcccgccttttttttttttttttttttttttgtttttttgagagggagtcttgctgtgtcgcccaggctggagtgcagtggcgcaatcttggctcacggcaacctccgccccctgggtgcaagtgattctcgtgcctcagcctcctgagtagctggggttacccgtgcctgtagagacggtgtttcaccatgttggccaggctggcctcgaactcccgacctcaagtgatctgcccgctttggcctcccgaagtgctgggattacaggcatgagccacgatgcccagccgtggcccttattttccttggcccctctgcacatagggaagcttcccatctctgaccccacctccatcccatcctgaccccacctccatcccatccttctcccactgcagggctccctccccgtcaggtctcatgtccccaagccgcctgcctggaagccgcgaacgggactgggaaaatggcagcaatgcctcctccccagcgtcagtgcccgagtacacaggtaagcaggggctctgggtgatgtgaggagcaacaggcaccctcctccacagcccctgctcattcctgctgccccccaccccctcccactgcctcaccctctaggtccacggctgtacaaagaacccagcgccaagtccaacaagttcatcatccacaatgccctatcacactgctgcctggcgggcaaggtgaacgaaccgcagaagaatcgcattctggaggtgagcccgcccacacgtgggagttgggggctggtgggtgggtgggtggcctgacttggccagctgaccatttccagcactcctgcccaggaaattgagaaaagcaaggccaaccacttcctgatcctctttcgcgactcgagctgccagttccgggcgctctacacgctgtcgggggagacagaggagctgtcgcggctggcagggtatgggccccggaccgtcacgcccgccatggtggaaggcatctacaagtacaactcggaccgcaagcgcttcacccagatccccgccaagaccatgtccatgagcgtcgatgccttcaccatccagggacacctctggcagggcaagaaacccaccactcccaagaagggcggcggcacccccaaatagccccacccgggcggtccacgggccgggccctgtgtgctgcggccgccatcccctggaggacagtcagtcggtattcctgggtcctgtctgtccccaaccgtgtctgggtggggctggagtctccaccctctgactttgagtccagtcctgctgtgggggctgagctgggaggttcagggactcagggctcagctcagtccccttgtctgtcctcccccacttcttgaataaaataatttaaagagaagttgaaccttgtccccccctccgaggctggccggggtcccacactccctggctgtgtttttagtctcctgttctttctcaaaccaactcctgtcttcaacccccataatcccctaatgcagcttcagccagggcactcccagcccccagccagggctgtttcgaagctgcctctgaactgatctctcaggctcgaggtgtcccactggcccttcctgtggccttggccacccccgcttgctggattctcctggtctgtgtggctgttgttactggccctaaccagcgtttggcatggggccaacttctaacttgatcttgtctcccctggccagcctggtgtttccaggcctggcatctacctctgggccagtgattccaggtttctctgagatctgtgtttgacaatccagttgccccctgccattgcctgggtgtctctctcagatgcaaggcctgccctgcaacccaggctggcactggcttcccagctgccgcccagttctacacagctcagccctcccctcctgtctcactcgcttctctccagccctgtcacctccctgcaaagtccaagccaatggcctgggcctccccatgtccccagctgcctcctgcccacacagcagcctgtgtgacccgttcgaagcacaaatctgattatatcccttgatacttaaaaccccttaatagcctacagcccgctaatggcttcccaggcttaggactaaggaccacgccctggtcctgggccgtgcacaaggtctggcgcctggcccccgtccaggcacagaaacgcgttactaatcagttcccagagctgggccagagcctgcctgactccaagacttgagggcaagggccagtccctagtggggaacagacagtgggtgccaccccagggaggcggcagctgcctggggccacagaagggctctgagaggcaggggctggcgagacctgggcagccaggggctggattgcccttcccaggctacagaggctcaaggaagtttccgggcaggacccactccaaggccccaggcagcggagggactggcctctcgagtccagaactggctctgcggggtgaggccgggcagtatctggcctggggcccagccgccccacctcccacagcagccaatcccggcccagggccaggcactcctgagctgtactccctcgggcacctgggcagcaggaaggaggctcagaccatgatgtacaaacgtagctgtattggggagggggtggggaggggggatgggggagggacgggtcagtcttccttcaggctcccaaacactgcggctggcacgctctgctgctccagccgaacctctgtggggaaggcgggagccagtcaccctcctggcgttggcctgtcccccgaggcccaccctggtaatgccaccgtccccgccccagccgggccctcaccgttgggctccaggtccatctcgtcctcgtcctcgtcctcgcccagctggatctcctcggggttgacctgctgtgccagctctgccagctcctcccgggaggcgtcactcctagggacgggccatgctgcctcagttccccaccccgggcccccttgggacctgtcccagtcctgtcccgtccaaggatccgccctcacctcacgaacaggatcttgctctgggcgcgcaagggctggtcacgctccgcctcagccgccagctgctctgcccgctgttccagcagcttcatgtcgtccatgccactctgcccaggggccaggtcagacactagggggtgggagcagggggtcagcgccacgggggcccctcccacacatcggacgttgcactatcccagtcccccaggtgatggcccagccctcaaggagattgccatcaggatccgaggctcccagacccggaaagcccaggtcaggccgggctgagatgccctggatcaggaactcagccagctgggacggctcaccggtgcccgtggcactgcccgagaccttgagcatctgcgaggccatgaagttgacctgcgtgttgtacgtggcctgcacgctgcgccggatacgcagcatttccttgatggtgtcctcattgccatgccggacctcaaagtccttccacgtctgccagaacgcgccggtcgtctgcgtggggggcagggcaggggtgggtgtgtgtgcccgtgagctggctgactccgccgcagcccccaaccctgatacccgtccctccccacagccctacccgggggtcacagatctgggagcagaagctgtagatggcccgggcgcggtcaatctccccgagcttgcactccatgtctgcaaaccgcaggcacatctcacgcgcgtgctcgtccgacagcacctggacaccggggttggggaggccgggagtgaggccggggtagctcgggggctcccaacacaccatggccatccctgtgcttccagaaggctcctcctcagcccctcccacctgcctggaccccttccgtctgctcagggacctctggccccggcccagccccccacggtgggtacctcaatggccttctggtagatgccgcgggtgtgggtgaccccatagatctcggccgcccgcttgatgtagatgttgaacatgtcatactgctgggcgggctccacggccctggtggcacgctcgtacacggccatggcatgccgggccaggccccactcctcctccagctgtgcgtacagcaggtacaaggctgggcggggtaggcggggagaggggagcacggtcagccggggccagtcagaaacccagcccgcccgccaccccccccatgccctctgcccgcctcactcttggcatattttggggggcagccgtccagagcctgttcaaacaggtcccgtgcccgctccagcttgcggcccccatagcgggcaatgaatttggtcaggtaggtgctccagatgtcggacacgttgggccacttgaacagcgagatgccgcgctcgtacgcctgttaccagagggagagtcacatgtgagagtctgcagatagagaccaccaggcacccgggatgtccttgggtggcgtctgtagggagcctgccaggaactcccttggggcccttccctgtccacgcctccctgtccctaatggcagttgtgggggtctgtcctctgcactgtctccctctgtgagaaccccaagaacaggggtgcaatgggacctgctaagcacagtctggccccataggaggtgacatgatgggtgaaggtgggtggctccccagctccgctgacgctggctgcctgtccccagggagaaggccgcaccccctgacagaggggcaggcagtagcacgcgtatgcatgtacgacctccccatttgtgtatctgtataatgcccacacgatccatagaaacacacactcaaacatgactgctccggccgcgggacatggccttcccacggacacgcaacccaccccctggaccccacaacccgtctcctgagcagcggggcagggagagcccgcacacactggcaccaacaccctccccatgagtcatgggtgcacgtggaagtaggattctgtgcctgctatggaatgaactgtgcccccctcaaaacattcatatgctcaaatcttaacccccagtacctcagaaagtagattcgtttgaagatgagatcactaagttaaactgaggtcgttaggggccacctaatccattatgactgatgtcctttataagaagaggaaatttcaaaagtgacacacacaaagagaaggccacacaaagacatagggagaaggcggctgtctgtaagctaaggagagaggcctcaggaggaaccagccctgcccatgcctcgatcctggacttccagcctccaggacggggagaagctaaatctttgttgtttaagtcacccagtctgtatactgtgtcacacaagccccagcagattcgtaagttgctgaggacccctggggaggggacactgccatcaggggcctctgggtccaccctagcccctcaccttgaagctctcctcgaagtacttgtgctcctccaggaacatggcatagttgatgacgatctggggtgttgcgatacgcaggtccaggatgcggtcgtacacggccttggtggactgcaggggtggggatgggaaaggttggagctggttctggagctgagtccggggccccgtccctccccagccacaggcagctcacctggaaggtgccgaggctctcctccaggtcggcgagcatggaccagaccttcagtgacttgtacacgcggttctgcacgggctctgaaccatcaaagtactcggcccggcgggcaggcagcgccgtggccttctgcaggggcagacagtggccggggaggcgctcaggggctgtccctggcccttgccctacaacctgcagcccccaccccacagcctgggcctgttctcactcgcagcagccgcaaggcctcatcgtagttctcgtgtcggagctccagctctccgcactgacaccacacgcttgccaggtcatccacctgcttgaagttcaccttggtggccttctccaggatgacacgggcctgccggggcgggcagaggcgaggctgagaccctgcccacctggacagctcccaccatcaagggtcagaaaggtgaccatgctcacaaacatacaggcacaaacacacaggcacacacacaggcacacacatgcgtgcacatatgcatgcacccaaatgcacatgcacacacacgtgcacacatccatgcacaaatatgtacacacacatacatgcacacatatacaagcacacacacatgcatgaacacacaggcacacgcaacagggtgctcacatcgtccagctgtccgttgtcctcataaaacttggcaaacgccacccacagagtgtggggcttgcctgtggccttgaaggggtccaccgtctgcacagcctctgtgtaggtgttgatgatctggggacaggagggaggaggtcatataggactcaggaccctgcagatgacggtcggggcagagctgtggctctgaggggtggggcctggagggtgctgtggcccctgtcgggagaggccagaaacgaactatggcccttgacaatggtcaggaccaagagagagctgtggccctaaggggcggggccaggagagagctgtgaccctccaaggggcggggccacgagggagctgtggccctccaaggggtggggccaggagggactgtggctctgaggggcggggctcgggcaggaggagaaccccaagaacaggggtggaattggacctactaagcaaagtcaggcccctagaaggtgacattatgggtgaaggtgggtggctccccagttctgcaggaaactggccctcaggggtaggactggggcaggcttcatgtacctcccgggggcggccctggtgcagggcgacacgcttgtgccactcgtgcacgtggtgtgggttttggcgcagcaagacgctgttgaggagcaggggccgccggctgatgagctgctcgaagcgggccaggcgcagctccaggtccacatcatctgggagccgcgaacatgtttgtcaggggcggagacccaggatgcaggtccccggatgccaccgcctccactccccaccctcactccgctccagcccccagccaagtgctctgggccctagacactcagctcgggtgtccacctgagccccacccccagccccaggtactgtggataccccctcctacccccactgttcccctagccctcctgccctgccaggctctggcccaggcctgagaagtgtccccattcctggctccttcaagacccccacaccccctgcatccactcagcctccttccctgctggcccccagctgagcctcccagggctgcctcacctgagatgtgtcccgcccctaccgctaatgtccactcagctctctccccaccagccggggcccccagaggctcaccctcctcctcgcgccccagctccgaggcggtctccatctttgcagcgatcatgctctcctcgaactgggcgtagctgtcaaacacctgtgtgaagtcccgcacggtcatcactgtccggatggcctcctcgtacacgtcccgagcctgtggggacccagggaaggggaggtgagaggaaagtggcgcaggggacaggcagcagcactcttagcaccagcctcaatgtggaacccctgggggccttctgggtagtgacgcatccagcacctctgggtagtgaccccaggacagagcctccgtggagccttctcacccccgccctgccctgcactgccagggtggtcttgggagcttcaggacctcctcagtaaactgggtgactgccctttgcacacagtgacctcagggctcgactgagacacatgtgtgaagcacttggcacccaataggtggccaaaaaccccccagcgcctatgggtccaccctgcagggaccctcgcctcagctcatcctccgaggcctcagaatttgctccaaagcgtccctctcgcttgcctgaccctcttccccagcccgcctgtcctccacctggctcgcccaccccagctcaggtcccctctctctacccagccctgacgggtcttgccctgctgcctccgacagccttggcctacacgtgcccctggaaggggcgctgcgaagcgcataccgcccacaccccactggcggctcccccagccaggagcatggccagcccgtttggctttcgaggctcccaacctatcttccctgggttcctgagcctccccgctctcggctctggccccctctgcacccacctgcccccaggccatcccctgagcttgccactccactgcctgccaagagccacagtcagctaacccctgagggagtggccctcacaccacgtacctcctcagtgctgtgcctgcgtcactgagctgattggtgacaggcagtaactgtcaccctgattttacaaatgaagacaccccaccttagtggggccaaggccgcagagccagagggtgaaccctgaacgcaaatgtggctgactccaaggctgacgtgcctgcgggcaggagtgctcccccaccctcagcaggatagtaatcgtgtgcagggatatgcatgtctgtcaaaaatggcactttttttttttttttttttttttgagatggagtctcgctctgccacccaggctggacttccgtggcgcgatcgcagctcacggcaacctccacctcccaagttcaagcgattctcctgcctcagcctcccgagtagctgggattacaggcgcgcaccaccatgtctgactaatttttgtatttttagtagtgatggggtttcaccatgttggccaggctggtcttgaactgctgacctcaagtgatcctaccgcctcggcctcccaaagtgctgggatgacaggtgtgagccaccacacccagccataaatggcatgttttctgcctgtgcatgtgtcaacatgtgtccccgagtgtcggagggagaccccgccccgaacccagagccccgtgtgccagcatgcaccttctcgaaatggccgctgcggatgtagtagtcggcgagagaacaccagagcttgcccagctggtcggtgaagcgggtgaggcccccgcggatgatggcgtccacattgagggactgtaccttgtccggattctgggagatgaggtcgcacagctcgtgccacagctgcagggcatggggcagtgggggagagtctcaggctcagtcatggagggggtggccctcccacccagttgccggctcccggcaggcccacctggtagttggacttgccggccttagacacgaaacgctcgtcgttcaccacggtggccaggcgctgggcggcctcatccagccggtcacttgacttgaggtactcaatgtactcctctgcactctcaggactcagctggggaccgagccacccctcaggcagtcagtggggtggcagggctacgcccacctcccgattcagtggcttcggggcgtccccccccacccatttatgagtgtcttgggcaaaagcaagccctgtcaaaccagcctcagccccactggtccagcccggttcctactggtctagccttggccccactgggttaggctcaaccccctgtgggtcctgccttggctccactggtccagcctcagtcctgactagaccagctgtggactttttgggttagccttgacccgcaagggcacagccttgactgcggtggtccagtctcagccccaatggtccagccttggtccttttgggttagaattgacccccaacccacaatgggtccagccttggctccactagtccagcctcagtcctgactggtctagccttggcccctttgggtcagccttgatcccatgggtccagccttgactatagtgtccagcctgggccccacgggtccagcctcagtcctgactggtccagcttagaatccaaacgtcataaaacagatactttaagtttgagcaaaccatgccccactcccgcccggctggtgcttccactctccaccctgcctgcttctccccacccctattcctggccctcttcatggctgtggttttactctagttcatgccatcagctcatatgcatctgtcttcctacttagactaaaagctccgtgcaggcagggagtgtcttagtcacactgtcctcagcacccatcgctatgcctaatgtgaaaccagtgtgaacaaactatttggaaaataaagacatgaatcacggacaacaacaaaacacatgcatctccaggagcctcttcccacatcccgtctgctgggtgacatcctacgcggagctagtgtcacagtgaggccgtttctggaaactaacctggggaaccagcgcacctgctaggctcaccttgaggaagcgccgatagcctcgcacagctgtctcaggcagtgggtgtgagcgcaggaagcgcagatacaggggccaaattcgagagtgctgcgtgatgggcagtgcccggagggcacggtcgaaggtgcggcgggtgtgtgtgacgcgcccctggtccatgaggaactggcagtaatctagccacagacgaggcatctgggggtgtggggagaggcggctggggctaagccacggactccatggcctggccacagacactcgatgtcctgtggctgagccacacctggggccaccacataaatgcggcgggacccagaaacccccagctccaggactgagtccagcccaacttcccatgcaaagaagcaacaggaatccaagcccccatccctaacatgctgagcccagcccctgtccccgccccacccaccaccatggactgagctccacttcccgattcatcccctcgccgagccccaaaccttgtgcatgaacacaaaggccctctcatgacagttgttgacatcttcataggcagggtcggtcacacagcgatgcttcacctgtgcccgacgcgccttcaggtatcggtaccagagtttgtagctggggaataggaggggacagatgctgatcggtcagctttatggacacccccagaaccatttgccctgccccagttggcaaatgtgggaagaaggggtgtgggaggggtgacatgtctcagcaatgacagggacagactgggacatcagagaaggtgtgctgacccatcaagggatgtacaggtcagtgatgaaacacgaagcaatcacccgggacccgggacccacttggcagttttgttataactggaccaggtggggtgggggctggtgggcagggcagctggagccattcccacctgcagggcagcagcttgagtgcccgctcgtatagctgattgagcctgggcttcggggcgccctgtttgaactcgatgtagcgaagccagcatttgacagagaattggttccgcatgatttcctcctcataggggaggtcctcttcctcctgccagggccagggaatgggaagaagagaggcctaccctcagagcctgtgtgcagcaccatcccactgctggggctcaggtccaaactccggacttttacctagatcccaccacccaccaaggaagtcaggtcaccagatgcccaggcaccaaaccagatgcccgacaccaagacagtggcccagacctttacccctcagaattcaactacccaaaatcgaacccaaatcatcagacttctcagtcattagggctctgggccaggaatgagtccgcatcaccactcgctttctgccccagatggtcagactccttagataccaaggccctggcccagatgccagtcctggacaccagaccccacttcttcaaaacgtgcctcttcccagacaccaggcctttggcccctcagactcccactgtcaccatctgacccatctccaccccaggcccagatgaccagatctttaccccagccaccagggctctcaggtccagattccaagccactagccccgcccccaggatcccactagccagcgtctagctcaactctgccccagaaattaaaagctaggcctttatctcacaggaggagttatacaccagaagccaagcctttaactctgcacaccaagaatctggtgaagatgtcacgcctctactccagagagtaagtatttcactggccatcgcctgacaagctccacatcaccagggttcttctagcctggccaccaccccagaaactgtcatgctgcagtccaggcctagagaccgctatccagaaaaccaagccttcatcccagaaaccagaaccctggcctcgtaagcaagcctttacttcagacaccgatcttcacctctcaaggttcagttatgcgatcttcctcctctcccattccctgcacgcccccatttccgcccctggttcgggaggctagacgcttcccttcgacagtggttttctactcagacccgaagatacaacaccatatttttactcctggacagttcggtgcggacatgacgatccggtctctggcccattagggttcccagaccttggcctggcagtttcggcctaaatctccttgccgacccagcctcgatcccctgcggcgtccaggtcccaatgccccaacgcaggccacccccggctcctctgtggactcacgaagacaaggtccggccgctcgggccgcgagagtcgcgccatcaccaccatttttctggatgcccaggtacaggagagagtcgcgcgcttatgacgtctaccactgacggcccgcccctccgagccagacccgttttctattggttaaatcatttttgacggacaggcccacgttattgacttcttttcgacgacgccagcgaccggaagcagaatagaggcgccagaagatgcgccatcaggatacacattggccaatcagcttcagcaatggagcgtgcaaaacaccagtgagcttctgtcttgctggagggtcggctttgggcggaactggctttgttgaccgggagaaacgagatgggggtgaagctggagatatttcgggtcagtggacacaggagtgggttgggaggctgggcaggggatcttcctggatctgaagatgaggttggaaatggggggacttcaaaggaagagggagctccaaggagaaagctcttaagatttgagaggaacctttctggttggaaatccaggagaggggacgctgggctgggggggttctcggatttgggcttctgggtttgggggctgtgagagggctggtccgaggaaggacctcagagaggggtgagctgagaagggggctctaaagaaggaagacttaagatcctgggggagctctcgggctcgtggtgggtgggtgtctatgacagggagattcctagacttcgagaagtggagttgaagagtgacgcctcctgggtttgggggtgctcccgggatcttaagtggggatgggtaatgaggtctcgaggagatgcttttgattgtagctggggcgtctgtgtgtctgtctgtgtttgagaggaagactccagctcagagggaactttcaggaatgaggcctcctggattataggagttaggttttagggtgcgaggtttctgtacccttggtgggagttctgggattcttgggtcggccgtaacgaggcgcttctggactctgcagtaggatgggtcccccaggctctgaggagcctctgcacattgcttggggggagctcacctcacccaccctctgccattccagatgataatctacctcactttccctgtggctatgttctgggtttccaatcaggccgagtggtttgaggacgatgtcatacagcgcaaggtgggcataagaggagtgtttgagggttcattccaggggtgggagagggtgtggggcagcagtctgctggggactaatgtctgcctcccataagccgaccctgccctgatgtggggctctggaggcctttggctcgtgtcccatttgtgacttttccttacagagggagctgtggccacctgagaaggtaagtgatctcttcttcctgccagagggatggaggaggctggattcttgtatccgggatgggttttagatgaaaattttaggccaggcgcagtggctcatgcttgtaatcccagggcatgggaggctgaggtgggtagatcacttgaggtcaggagttcaaaaccagcctggccaacatggcgaaaccccatgtctacagaaatacaaaacttagccaggcatggtggcaggcgcctataattccagctgcttgggaggctgagggagaagaatcacttgaacccaggaggtggaggttgcagtgagcccaagatcacgccactgcactccagcctgggcaatagagtgagactttgtctcaaaaagaaacattttactctcagccatgagtaaggaaccgagagcagaggagtagatggtttccttattgccttctcctggaagagtgaagcggatcccacgcggacccctttgtaattggcagggggcttccagtgaagacactgaaccctgaagccgtggtctggggcagggtggtgggagaggtgggcgggggggggtggtcccggctctgaggtgtgtgcccctccccccttcctgtcccacccgcttctccacccctagcttcaagagatagaggaattcaaagagaggttacggaagcggcgggaggagaagctccttcgcgacgcccagcagaactcctgaggcctccaagtgggagtcctagcccctcccctgatgaaatatacatatactcagttccttgttattcatttaagtgttttattcttttatcagtttttgggggccgagtgagacccaggatgcctcaggccctcagggggcttgtgtcgggggctgggggctgctgttccgacggaagccgagagcggtcgggtcctgaggggtgagcaggggttggggactgagggtcccagctcgtttctgtgctccgtcctgtggatgaagaggggtcagccagggggagggctcaagggcagtgccggccacaggtggcgaacaatggagagagggtgcaggtagccaccgtgtcccacctcattgtgagcactggtctatgtttaccctcaatatctgccatttagggtggcatttgagtgtgaggtggcaggtcttggggccctcgctgggatcttgatcagaacccaagcttcgtgtatgtgtgaagtcaacagatgtgagtatacagatgtatatatcctatgtgtgagcttacgtgacttcctccctgggatactttcctaggaaggggtcctattttctccctttggcctccccagaaccttcagacttgggggcaggagccacaagttccagccatgggtcttacactagcatggcccctgtataaccttgggcccctctagccactgcctgggccttggtcctcccatctgaagtcagggcagcggatggacagagatggggcaggccctgttccctcctggctggggtggagggcaggatcggagagcactgcctggcgggtttctcctcgacatcgccagaacatcacctaccttggaccccacgggctggaagccgggcaggctgctgactgtcacacgttggtcatccatgcggcggccctgggtactggccagcatgtccatgaggctgtccatctcgggggtggggtcgctctctgcgtggacgttcacagacttgggaggacacagccggagtgggggcccccaaccctaccccttcacccccacacagatgcttcagggtgcacaaccacctcccacatcccgtgcccccaggccctccagatgaccacttgccctgcactcccaccccgttcacgccccatggacagcacccccgtgcccatgctcacggctcttggtggtctggcccggcccggcttgcagtgaacagcgctgtccctccatccggtcgccctgcacgtggctcagcagattgaagaagccctcctggtctggggagcccgcctggggacagactcgctcagtctggttggcccttcagcttgggggcccctccccaaacttcctagccagcttgctcacaccctgaccccggggcctgccgtccccacttcctcagctctcaccatggtccccgccgatcctctctgcagagctgttctgaatgagacatgagtctccttcccaatcccggcccccgccccaggggccctggccagcagtgccacttcacgtggtaccgcttcaagggacaggctccgatgcgtgtcccgccgtcctagattggggcctgatgagtgtggcctgggagctgggacacgaatcagggaaacatggcccaggagctacccccaggtcccagcatctcccatcaataggggtccacacggagagccctgccctctgccctggggcctggcactcagacccccaagcccaccagcccctttctacagccacaactgggtcagggggtcctaggagactcactcgttaattaggtgccctacaaactagtcttgtcaatcatgggctctgagaccttgagctgggggtggggtgggggcagggccctctcacctcggcacaggggcctgagccttcctccgtcttctcctcctgatccatcatgtccctggactccagtcacttttctgctggcctctgccccggcccagtgccagagagggccttttaaacgtccaggacgtgggggtgtggattccccccatccccaaatccccagctcatgccccatctgctcccacccaagcttaagccccataaagatcatccagataattgtttgcccacaacgatgctggatctggcatggtgggtagggggcagggcgacctgagcttggacctcgctgtgcccagcagcaatgactggaccccagggactctcaggtgtgatgtcacaaaaggcctgagcagcatccccacagttggagaagggaggccaacagtgtagggtggtagctggcttagggaggacttgcaggtgtccccacccagccacccaggttcccccactggctcctgaaagggcagctgccacctgcagtcggtacagaaaaaggaggttggagtcaaaggccccttccctccctccctctctgcacctgcctcagacaccaccggccaccctagctccagctctgtctccttggcagcaagtcaaggggtctcccagccacccttccttcaactcactgtccctggagcctggttgcctgccccagaccccaaaacaagaaagtctggggtctcctgttcccacaccacctaaatgccaggttgagctatctcctctcctctatcaccctagccccaggtgggaacaggaggcgagactccctggggacagaggcaggcggggagaggacgtccctgccttttcccccgagccactgtggctttccctcagtgcccaagcaggggataccactgggaggtccccatccccttcccttccctccccaagacgcctttacggaaaccagtggaagtttcatctcagaatgaatgggctgcactatcaccacctctgcccgagcctcctctgttccacaaaaggccaagttcacactctctccctctatgccaatgaagtgtccccctcctcagtacgtgtatccctttcctaggcctgccagaacaaagtgtcatagaccagatggcttaaaacacataagttgacttttgttatatatttttatatagagatgaggtctcactattttgcccaggctagtctcaaactcctgggttcatgtgatcctcctgcctgggcctcccaaagtgctgggattacaggcatgagccaccatgctgagcctttaaaatttttttttaacaaatttattgagccaacgttccagaggccacagcctgaaatgaaggtgttggcagagctgtgctccctctgaaaaccaggtctcaggagccctccttgcccctccctggcttttggcagtggcctgccgtccttgatgtccttggcttgtcactgcagctcttcactccctgcctccgtggtcacatggcattctccctctgtgtcccagtcttcatatacccatttccccacccccccaaccacctacacagaaccaggcagacatataactatcttacaaggacaccagtgatattgcattaggggcctactctactccagtgtgacctcatgctcactgctaatatctatactaaccccatttcaaataagatcctattgtggggtattggggattagtacttcatatcttttgggggttagtggtggggtggctggccctaacagctctctgtccccccaaggggtcaggctgagaagctggaggcggtcctggcttccatccccccaggatctggagggttccccgccttcccctgctcaaaactcttgagaagacaaaacccaaacacctaggggttgtggaaatgttctaaaatggattgtggtaatggacacacaactccaaaaatactgaaagccattgacttacgcaccttaggtcagcgagttgtatggtatgtgaattatatctcagtaaagctgttacaaaaggaggaaggggcagggtgcggtggctcatacctaaaatcctaacactttgggaggccaaggcaggaggatcccttgagcccaggagtttgataccagcctgggcaacatagggagatcctgtctcttaacaacaacaacaaaatcaaccgggcacggtggcgtgcacctgtagtcccagctacttgggtggccgaagtggaagaatcccttgagctcaggaagtcgaggctgcagtgagctatgatcgtgccactgccctccagcctgagcaacagagcgagacccgtctctttacaaaacaaaaacaaacaaaaatggggaggagggagaagaaggaagaaaggaagggaaaaggaaaggaaaggaagaaatagctcaaactcctacctacggttgccaaccgtcctggtttgcctgtgactgtcctatttttagcactgaaagtcctgcatcctggcactgggatgggtcagtctgaccttgtcctacagaagtctggcccctgctgcccccaccctccagccttcttaagctcggggctcctcccttctctacctggacatgctgtgtggctgcttctagaatccatttagggataatgtcaaaaggctgcttcttcagagaggccctcgggggtcatcctcagtaaagtcccctcccacccctaccttctgtggcacttgttgtcacattagtttatttcctttagggcagcatggatcctttcctatctcccccagaccttcgggtctgattcactccctatgtcccatgtaagtggcagggggcttggtaccttcatcaacacggccgagcgaaggaaccagctcagaccagcaagagtctgtttgcacacatacctcgcaccttaaatcggagacctcattttgtatgggtgctgctggggctgtgccttccaagcgacaggacacacagcagaagcagcttctgaaattccgagtgtgtgtctgtgtttgcaagcatttgagggcgtcactcaccccatgtgtgtatcagcatgttaattcgattgttggtccacgagggtaagcgttgcgcctcccggaagagggtaaggctgtgacaaatgccccctggggacaggctcctggcttgaacccagcaggctcactcgtcgtggccttggattagggatcccgctaagcctcggtttcctcgtcggcaccgcagtccaggtcggaacattgggcaggactgaatgaaaattatgtccaggtgcctgcacacaagaggtctccaggcctcctgaatccatcaaaagttatccaagacggctgctgctgctgctgctgcctctaaaccctgaagtacagaaggcaagtgggtcaagatcccaggcccagacagtggcggcccggtggcatcgagtgggtgccgtgtatcttgcaggcacagaacctcccggggaagatggagggattattgccctgcgatcctgcttcgcacgcaagccaggaagtgtgtgtctgaactcccatctgtgagcgtgtcgtcgaggtgtgcacctccagcgacttcgtgctcggcagcgcggacgcacctgcccgtcctccccgccagggactcaacttcctgggcctgggcgagaaccgacggcggggaggggccaggtgcgcagggggcggggacagggcccgcggggcggggtccacgtgggtgacgcgcggggccacgcccccaccttgggacacacccggaagcggcggcggcgcccctcggggaagatggcgccctcggggctgaaggcggtggtgggggaaagtgagtgcctctccggggccgggctctggcgtccggtgtgggacgggggtcggggacgcacgggctctgggatcctgggtttcatggcggctgggagttgggggccgggctgggcgtccgagcacctgaccctcgagggggcgggcggggacgggttcccagctggacgcccctgctctccggtgccagaacagaacaaaattggggggccggactccggggacccaaaggggacgggtagagtgtggcggaggctggggcccggactcctgggcctcctagggtgcctgccgggggaggagggcacagctggatgcccacactctaggatctcttaagccgggcaaagttcaggggctggattcttggggcctcctagggctctggtcagcgaccctaggtgctgtgagcgctcaggggacgtgtccaggccccacaggggtggtgtaggggatgtcttcctccttgccccatttccaggagcgccttgcagctggaggacgcaggcgtccaggcctcaccggccccggttcttgggggaagggtggagggcgcctcttcctccaccccggggagttccggcctcagctgctccttccgccctggccgtcttgataacagtggacatgacacagtggacgtggctgggcggggccaccccgttacttctctccactctctcctctaggcagggcggtctgtagctcaaacccctttaattgggggagattagaaaaaagtgattccattttacagatgaggaaactgagaccggaggtcagtgggatagcctcagctaggcatgcctcagagctgggaaccaggggtcctacattttagaccaggttggggggactggctgaaaccctcacagcaggaatacttgaggtagcaggtggggaagccgagagcctggcgctagaggcagatagagctgtagatgatcccggttctcctcttttcattcacctaaaacatgtttatcgagtggcaccttttgccccagcactctgccacttagacactcaggatgcgtaggtgagttacatgttgcctaagaatctgtttccctgtctgtaaattgggggtgaccccagaagccaatttgcagaactgggggctaaaaataaatgattcctgtgccgtgtctcacacctgtaatcccagcactttgggaggccgaggcaggaggactgcttgaggccaaaagtttgagaccagcttgggcaacatagcgagaccccatctatacagaaataaaaataaattagctgtgggtggtacatgcacctgtagtcccagctactcgggaggctgaggcaagaggatcgctggagcccaggagttggaggccgcagtgagttatgatcacaccactgcactttagcctaggtgacagagtgagatcctcctctcttaaaaaaaaaaaaaaagtaaatgggaattaagatgggggttcagccccaaggctgagaaggcttggggcagtggtgggaccagagaaccagcattctgacccctcccctcccttccctgcagaaattctgagcggagttattcggagtgtcaagaaggatggggagtggaaggtaggggtgaggcagatggctgggtacccagaggcagctcatcatcaggcctatggggaagaccctgaatgtgggacccccaagaactgcctgtccacatgggtggagttgggtgaatgggttctgggtcctcccacccagccagcccttgaaactgcccctcccactgccttggccccttctggggccagctgtggcctcttccgcctgctcctccatccatctgtccatccatctggacaggtgcttatcatggatcacccaagcatgcgcatcttgtcttcctgctgcaaaatgtcagatatcctggctgagggcatcaccagtgagtgaacgcgtccccagtgagatgggacctgagcgtgggaacccctgactgtgcccctctcccagggttcagcccttgagtgtaggatcccctcaaatcgtccagaactcccaagtacgcagctccctgcacggacagcccggatcatgtgaccaaatccattcttaaaccttgcaagctgactgcgggagcccatggattgcaggcctcccctgcagcactccctggctgcagccccttcctgaccgtgcagctccctcgtggagccctgtgtgggactcccagggtggactctggatgtggggtcccaagaatgcagagccttctatgggtgaccccaggtggtgtcccagtcactttgccattgagggataggtgctgagggagcctgtcctctcagaacctcagtctccctgtctgtaaatttggggaacccagttggctgcacaacccctgcagaaccctgtcgtgtggctcttagctggtggtccctaagtgggtttctcctgcagtccctcctaagcatccacccctcctccccaagcctccaaccccccacacctgagactccccacgtggccctgcctggatgccacccacctgtgtcccttcctctgttcctactagttgttgaagacatcaacaaacggcgggaacccattcccagtctggaggccatttatttgctgagccccacggagaaggtgcctacatgagtgagcgtgtgtgtatgcgcgtgcatgcgtgtacatgtgcatgtgtgtgtatgtctgcatgcatgtgattgcatgtgtgcatgtgtatacgtgtgcatgtgtccatgtgtatgtgtgtgcatgtgtgtgcatgtgtgtgtgcatctgtgtatgcatgtgtgtgcgtgtttgcatgtgtgtctatgtatgtgtctgtgtgcatgtgcatgtgtgtgcgtctgtgtgtgcatttgtgtgtatgtgtgtatgcgtgtgtgtctgtgggtctgtgtgtgcatttgtgtctgtgcatgtgtgtatgcgtgtgtatgtatgtgtgtgtgcatctgtgtgcatctgtatgtgtgtgtgtgcgtctgtctgtgtgcatgtgtgtatgcgtgtgtatgtatgtgtctgcgtctgtgtgtgcgtctgtgtgtatctgtgtgtgcatgtgtgtatgcgtgtatatgtatgtgcatctgtgtgcatgtgtctatgtatgtgtgtgcatctgtgtgtgcgtgtgtatgcgtgtgtgtatgcgtctgtgcatgtgtgtatgcgtgtgtgtgcgcatcagtgtctgcatgtgtgtatatgtgtgtatgtatgtgtgcgcgcgcatctgtgtgtgtgcatgtgtgtatgtatgtgtgtgcatctctgtgtgtgcatgtgtgtatgtgtgtgtgcatctgtgtgtgtgtgcatgtgtgcatgcgtgtgtatgtgtgtgtgcgtgcgtgcatctgtgtgtgtgcgcgtgtgcccatgtgggtgcgacactagtgtgcatttgcacatatacatgtccccgtccgtccatgtttgcacatggtggcagatggggggtggctgggaggcctaggcagccaatgagcctaggtgtgcaggctcaggcccagagagtgatccaccttccccagtcggttcaggccctgatcaaagacttccaggggaccccgactttcacctacaaagcggcccatatcttcttcaccgacagtgagtgaggagagcctagggtgttggtgggtggggcaaggaggtgtgggggctgctctggcctgatgccccactcctgcctcaccccagcctgccccgagcccctgttcagtgagctaggccgctctcgtctggcaaaggtggtgaagacgttgaaggagattcaccttgccttcctcccctacgaggcccaggtacggcccgggctcatcctgggcagggggtgggggtttgtgaccaaatgtcccctgttccctcagaaacagacactgaggctgggcgcagtggctcatacctgtaatcccagcgctgtgggaggccagggcaggaggatcacttggggccaggagtttgagaccagcctgggtacagagcaagaccccgtctcttaaaaaaagaaaaagaaagaaattagcttggcgtggtggcgtgcacctgtagtcctagctactcatggggctggggtgggagagtcgcttgagcccgggaggtcgaggctgcagtgagctatgattgcactgctgccctccagcctgggcgacagagcgagatcctgtctcaaaaacatacataaagtaaaattttaaaaaggggaggtacccacagagtccaaggagctcttgccttgagttctatcccactaggcccttgcagggggcagcgtagagcgcaccgcggggttgtccagccagcttaagggacacgggctggggtatttatccactgactcctgcaggcatgggtttagggttgacctgggcctgcctccaattcggcaaagcaggcttcagggaccagggacggctcccaggaggtgcaggtggcggcagcgggaagcggggcaggtgtgcacctgcagcggcaaccctggtgcttctgtcccctcctcgcccaggtgttctccctcgatgctccccacagcacctacaacctctactgccccttccgggcagaggagcgcacgcggcagctcgaggtgctggcccagcagattgccacgctgtgcgccaccctgcaggagtacccggccatccgctaccgcaagtggggaccccacccagccccaccccgatgccgacccccccttaaccgcgtgcaacacctaacctttaacctctcttgtgaccccagccccggccctaccctggcccctgactctcaccttcaaacccatccttgaccccatcccctgatgatgtcccccgtgtctgacctccccgccaggggcccagaggacacagcccagttggcccacgccgtcctggccaagctgaacgccttcaaggcagacactcccagtctgggcgaggtgagggggcgtgcttgggaggtgaggggcagccccaaccggctcagggtcagtgcctcattcctgccctaaaccccaccccagggcccagagaaaacccgctcccagctgctgataatggaccgggcagctgaccccgtgtccccactactgcatgagctcacgttccaggccatggcgtatgatctgctggacatagagcaggacacatacaggtctgcagacttggaacccgtccccacccttgccactgacctggttccccagtcctcagctcccctgacccccaggctccctccttcctccccaggtatgagaccaccgggctgagcgaggcgcgggagaaggccgtcttgctggacgaggacgatgacttgtgggtggagcttcgccacatgcatatcgcagatgtgtccaagtgcgtgcacacggggaccggatcccccccccaccgcccactgtgggcctggtagcggccttgggatccctggctgctgccaagtctttggccctcatgagcacccctcgtgtgactccagactggcctccaatttcaccccacctctccctgtcccccctgagtgggctcacccatggcctgtggctcctctcccctcactctcacccccgcccaccctcatggccaggaaggtcacggagctcctgaggaccttctgtgagagcaagaggctgaccacggacaaggtaggggcggacccaggtcaccaaaggcgctggtggaaggaagcccccctccccatgggcgcagggccacagcctggatttcgagcctggactgagacccaggtgggcactgcctggcttcgccccccaatccctaccctcttccccctacttccccaggcgaacatcaaagacctatcccagatcctgaaaaagatgccgcagtaccagaaggagctgaataaggtgtgctcgggtgggcagggagcggggacacctcggcccctcaaccccatgctctgtctgcgttctgccttgactcagcctttgttatcccccaacccccaccctgcaccctgcagtattctacgcacctgcatctagcagatgattgtatgaagcacttcaagggctcggtggagaagctgtgtagtgtggagcaggtggggcagggcttgcggggggcaggggtgatggtcctgccaaggcggggtattggggaggggctgaactgtagagatggggggttctgggggaggggcagggcttgtggagaggtggaggggccttggagagaggtgggacctggtggggaaggagtgggtcttgtggagaaacggtcctaggatgagggtgtggcctgtgcataggtggatggggcttggagaggtcagacttgggtgaggggcagagccttggacaggtggtcccaggacaggaatgtggcctattcataggtgggtgggaccttggagaggtaggcagggccttggagaggtgcgacctgggagaggaatggagccttggagaggtgggacctgggtgaggggcagagccttggagaggtgggacctgggagaggaatggagccttggagaggtgggccctgggagaggggcggagccttggagaggtgggacctgggtgaggggcggagccttggagaggtgggacctgggtgaggggtggaaccttggagaggtgggacctggatgaggggtggaaccttggaggggtgggacctgggagaggggtggagccttaagagaggtgggacctgggagaggggcggagccttggagaggtgggacctgagtgaggggtggggccttggagaggtaggagctgggagacaggtagagccatggagaggtgggatctgggtgaggcacggggccttggagaggtgggacctgggtgaggggtggaacctcggagaggtgggacctgggtgaggggtggagccttggagaggtgggacctgggtgaggggtggagccttggagagctgggacctgggtgaggggtggagccttggagaggtgggacttgggtgaggggtggagccttggagaggtgggacctgggtgaggggtggagcctcggagaggtgggacctgggtgaggtgtggaacctcggagaggtgggacctgggtgaggggtggaacctcggagaggtgggacctgggtgaggggtggagcctcggagagctgggacctgggtgaggggtggagccttggagagctgggacctgggtgaggggtggagccttggagaggtagtctcaggatagtggtgtgacctgtgtgtaggtgggtggggcactggaaaggtgggacctgggtgaggagcagggcctgtggagagactgtccctggacaggggtgggaccttgagagacctggtgctgagatgaggtaggacccaaatgtcctcttgccgaggatcctggggatgtccttggcccgcctctcccatccccttccctgacacatagcggccggtggacggctgaccccatgcccgcaggacctggccatgggctccgacgcagagggggagaagatcaaggactccatgaagctgatcgttccggtgctgctggacgcggcggtgcccgcctacgacaagatccgggtcctgctgctctacatcctccttcggaatggtgggtgggggctgcagggagttggaacgtccccatttgccagcgtctcccacgatcctgggaactgctgaaccccacagctctccttgggtcatttgcactcaccgggctcaccaacccccacagctacccctctggacccgggaaccctcctccattggcttggggattcctccactgaggtgagggctccctgctaacgtagaaaccctcacatctgtgattcctatagatgtggggctccctcagctcatctggaggagcccctgatctaccccctccaggtttcccactcttgctcacactagcacagggtactgaggccctccccactgcaaggttctctcatcagagtcctgggagctcctcagcccaccccaaactcccctaaacctgggagctcacctggccgccgcctccaccctgcccattcccgtcccccaggtgtgagtgaggagaacctggccaagctgatccagcatgccaatgtacaggcgcacagcagcctcatccgtaacctggagcagctgggaggcactgtcaccaaccccggggtacgccaggagcgggcatggggggaccctgggagagggtgcggatcacagccggggctctgcaaggcagagggccattggtgcacaggcacggtgtggttcctggcgtggtgtggttgctgggaggccaaaagcagtgtttcgggtctggtctggggcccagaggacactggggcctctcccagtcccagcttacacaataggcaggggaagtgagacatggtcgctgccaggctggtcctggcagtggtgcagttgggagcgggtggtctgagtgctagaggcagggagtagggtccccagcatgggggctacaccacattgtctatctgggctcccaggggtctctgagggtcccccgcacccatccagcacccacacacagccatgtgtgtgcttgactcttgggtcagcctctcctgtctctctctggccctgtgcgtccccctccagggtgccctcaccccgtccccatctctcccccatccctcatccatctcgctgtgcactgtttctccatatctctctctctcacccttctctctgccttcccctttctctctgttctctgtcttgctcccctcccctctccgtcccccttctgtccccatcttcctctctctgtttcctgcttcatctcttgtctctctctttgccttcatactttgtctcactgcttcttatctctttgcctatctctgcctctgtctttgtctttctctggctcgctctctctccctttggctttctctctccgtctctctctggctcactgtttctctctctcgctttcttgctgtctctcgctctctctcgctctctgttccacttccccatctttgcctgccatcccccaccctaccagccacaccaggcgcagcccctctgtgaccagcctccttcccctcaatccccctgctgccctccctgccctgcctgtagggctcggggacctccagccggctggagccgagagaacgcatggagcccacctatcagctgtcccgctggaccccggtcatcaaggatgtaatggaggtactgggtggcaggtcagggtgggggccagccctccgcatcggctggcggctcagcctccctcctgctgaggtgctaagcctcagggcttaggggaaaatgctcattgctggcattcccttggcaccgatctgctctgctgaggggggcacgccaagcccgcagctgaggaattggggtgacagcggggcctgtgctggggagcctcacttcctccccacctgccggctgcctccgctatatctctctagtctgttcccctgtcccgcaggagtgcccctgagccccagccctggccttcccaggatcccagggcagcaccatccaatggcaatgggcctggggcggcttcctggcttcctccttgtccctctaagagccccggcccctctttctgcgtgggggccagagacctgggcctcctcatccccatggaccttgaatacctggacttctggggctctgaggggctgagagcccagacactgggttccccaaagggctgggggtattgactgatggtccccaagggcctggaggcccagactactgggttgccgaggaactgtgggtttagacttctgggtacccaaggagttatggaattagattcgtgggtccccagtgagttatggatctagatttctaggtccccaatggactagaggcctagactcctgggtcccccagaggcaggaggtggagatgctggttcctgtctgccaggatcttggcccctgaataccccgtggggggcactcctgaccccggaccccatgcctggggttcctcccctaacctgcctctcggccgccaggacgccgtggaggaccggctggacaggaacctgtggcccttcgtatccgaccccgcccccacggccagctcccaggccgctgtcaggtgaggccccggggccgcccccgcccacgcctgggtctgtgttaggtgggcggcctggcggcggtgagggcctcctgcctggactttctgcccctgccctgcacagtgcccgcttcggtcactggcacaagaacaaggctggcatagaagcccgggcgggcccccggctcatcgtgtatgtcatgggcggtgtggccatgtcagagatgagggccgcctacgaggtgaccagggccaccgagggcaagtgggaggtgctcattggtaagtcaccaggactgggaccctggggtctggggcttgggttcccggggcctgggcttgtaccttctaggtgtctggactccagagtccttggagtcagggacctggtttgctgagggacagggacagccccacaccagccgggaccgggagcctgtcaaagacgaaggcagcgccccccaacatcttccccaaacctctgcccctgcacaggctcctcacacatcctcaccccgacccgcttcctggatgacctgaaggcactggacaagaagctggaggacattgccctgccctgacccctggccccgccccctacccctccctttccagagaaataaactcttcccgtcgctctgccagccagtgcctacctcaccttcttatcaagggagtccctgggagttgtgctgagccaggcctgtgccccaggccccaccaacccctattatcctctcagaaggagaattagcctctccctgcccctgagggcatctcaagccctcatggaggttaagaacttggacttttggcagggcacggtggctcacgcctgtaatcccagcactttgggaggccaaggcgggaggatcacttgaggtcaggacttcaagaccagcctggccaacatggtgaaaacccatctctactagaaatacaaaacaactagctgggtgtggtggtgtgcacctgtagtcccagctacttgggaggctgaggcaggagaatcacttgaacccaggatgtggaggctgcagtgagccgagattgcccctttgcactccaacctgggcaacaaagcgagactccgtctcaaaaaaaaaaaaattggactctcatttgaatatcagctctaagatattctagcggtgaggccctgaccaacttccggggttcccaatctaaaaacagggagcccaaaatagcagctgctttgcagaggagagaacagagatagcgcaggaaggctggtggcgtgcaagcatgacagctgctgctaccccattttcactggaaccattttggctgctccgttaatattgttattaagcagaatggaccctggaactccaacccccctagaactgttccaaggggacctgtaggcatacgatgccaggagttgtgttcagcttctgctgtattcatgtgaggcacacagcaaacgctccctgctttctcctcccagccccacggggttcacagagactcctgactgcaggacttatcagggccttcggtgggtgtatctgtttgctagggctgtcataacaaagtaccacagactaggtgacttaacagaaattgccaggcaccgtggctcatgcctgtagtcgcacattgggaggccaaggcaggttgatcacttgaggccaggagttcaagactagcctgggcaacatagtgagatcctgtgtctacaaaaaaatagaattagctgaatgtagtggtgtgcaccgtggtcccagctactcaggaggctgaggtgggaggatcatttgagcctgggaggcagaggttgcagtgagccaagaccgtgccagtgcactccagccttgggtgacaaaagcgagacctccatctcaaaaacaaaactataatcccagcactttgagaggctgaggcaggtggatcacctgaggtcaggagttcaagacaagcctggccaacatggtgaaaccttgtctctactaaaaatacaaaaattagccaggtgtggtggtggacacctgtggtaccagctacttgggaggctgaggcaggagaattacactacgcctccttcgggaggcggaggttgtagtgagctgagatcgcaccgttgcactccagcctgggcaacagagcaagactctgtctcaaagcaaacacatttatagtcttctgtttctagagactggaagtccaagatgaagatgtccacaggtgtgactccttctgaagcttctctcctttccttgtagacagctgtgttttccctgtgtgttcacacagtctcctccccccgccccagtgcatgtctgtgtcctaatctgctcttcttacaaggaaactggtcatgttggattagggcccacgcatatgacctcatttttacttaattatttctttaaagattctatctccaagtatagtcactttctgaggcagttgcggggcaggacttcagcatagacatttgtggagaggacacagttcagcccatagcactcaagtgaggtgtgaatctcacagcaccaatagaacaggagaggccgggcgaggtagcttacacctgtaatcccagtgctttgggaggcctaggtgggaggatcgcttgggcccaggagtttgagaccagcctgggcggcataacacgatcctatctctacaaaaaaattttaaaattaaatttttttaaaatttttttatgggcatggtgtcttgcacctggggtccagtttactcaggagactgaggtgggagatcgcttgaggctaggagtttaagaccagcctgggcaacatagcaagaccccatctctacaaaaaataagaaaaattagtcaggcacgtgatggcacacgcctgtagtcccagctgctcaggactttcaggtggaaggattgcttgagcccgggaggttgagactgcaatgagctatgatcatgccactgcactccagcctgggtggcaaggtgacaccctatctcaaaaaaaaaaaaaaaaaagaaaaaggaaaagaaacctctctggggcacagatatacagccagccacatgagtaatctgaggcaaaaggggctgtgggagcccatatcacatctaatccacccagactgggggcaatcagggaaggcttcctagaggaggcagcatttgcatagagaatgaaaatgaagggggcgaagggaagggaggggagggcagagcagaagccaaggccagagaatgcaggaggcccctgaggagctggaggggagggtactgacctgcaacccaatctgagaaccacgtggaggttctggtgaggccatggtgagggttttggtccctgctgaggccataggacatcatagacagggtctgagttgggacaggtagggacccatgtctcatgttggcagtgaaattctcactgctggagtgggtgcctggggagggggcagagggtggggaagcatcctcttcagaggtagagcctctcttaccgcctgtgctcaagcgatcctcccacctcagcctcctgagtagctgggaccatgagtgcacatcaccaagcccagttaatcttttaattttttgtagagactgggtctggctatgttgcccaggctggtctcctgggctcaagcgatctgcccacctcggcctcccaaagtactgggatgacaggcgtgagccaccgtgcccggcctctctcctgattttgaggtcacagatccttttgagaattcagggaaatctaaggacactcatcccagaaaaactgcacacacaatttgcaggtgggggctaaggaaaatgcagccccctctgattcagcagttccacaattaggatttatcggaatctcccaccagggcagggagatggatgaggagagttgtgaaggggatgaggtgtggggaagaaagtgggtcggctgtggacccctggggtccgcctgccctggatatgcctttgcagggcctcagcagggacgcgttttaacttacgggaggtgcagggagtgggagggaggtggttttaatgtttaaaacttaagctcaaggtcgggcacagtggctcacgcctgcaatcccagcactttgggagggcgaggtgggaggattgcttgaggccaggagtttgaggccagcctgggcaacatagcaaattcctaaatatatgtatttttgagacaaggtctcactctgttgcccaggctggagtgcagtggtgcgatctcgattcactgtaacctctgcctcctgggttcaagcgattctcctgcctcagcctcccaaaaagctgggatcacagacgtgcgacaccatgcccagcgaatttttgtacttttagtagagatggggttttgccatgttggccaggctggtctctaactcctgggctgaagacctcccacctcagcctcccaaaatgcaggaattagaggtgtgagccactgtgcccagccaatctctacaatactctttttattttattttatattatattatatttatttatttatttattttttggagatggagtctcgctccgtcgcccaggctggagtgcagtggcatgatctcagctcactgcaacctccgcctccccggttcaaccgattcttctgtctcagcctcccgagtagctgggactacaggtgcgtgccaccacgcccagctaatttttgtatttttagtagagacggggtttcaccatgttggccgggatggtctcgaactcctgacgccgtgatccacctgccttggcctcccaaagtgctgggattacaggagtgagccaccgcgcccggccaatactcgttttaataaaaattttaaaatgtattcacgcctaactgggtagttacttgatacaataaatgatcttttctagattaagaaaaaagaaaaaaaaacatttaaactcaatttcctgggaagccgcagttttgcgccgggagtggcttgtgtaggcacgcgctgcgaacgccagggggcgctgcggcgcaatttcccggtttctttgatcttccgcgtctgtaactggagatgaggtgacccgaattagacacgacggggaagtaggtcaggggttattccgtggttctcagcggagacaaaagtctgttgcttaaaccgcctctgcctctgctccttacttatacccaggtgatgcaatgtcttcacactaaaggcaaatattgagtctacaaatatttatgtgtccctgtgggcggcggcagctgacaatatcgggtcctaacgagcacgaagtcaagctccctctgcacgctttatgcagatcctcaaaaccctcctgtgaggatcgctggagcctaggagttcgaggctgcagtgagctatgattgtgcctctgccctccagcctgggtgagaaagcgagaagttgtgttaaaaacaaaaaaaaagttggggggccgggcgcggtggctcacgtctgtaatcccagcactttgggaggccgaggcgggcggatcacgaggtcaggagttcaagaccagtctagccaacatggtgaaaccctgtctctactaaaaatacaaaaattagccgggcgtggtggtgggcgcctgtaatcccagctactcgggaggctgaggcaggagaatcgcttgaaaccggaaggcagaggttgcagtgagccatcatgccactgcactccagcctgggcaacaagagcgaaaccctgtctcaaaaaaaaaaaaaaaattatcctttgagatcccttcccccaagtccatttcccatctcatggtgaacctggctgctgttcttcaaacacaccacactgtccctgccccagaacctttgcacctgctattcccatcatccgcaatgctgtgccttgcaagctattgtactccttcctccttcccttccccagctgggagaggcccctgctttacttccttgtggtatccccacttagggtgctttctttctggttctcttctggtaccgaggaatgatcctcattctggatttggcaggttgcttcctctctccccatccctgccccaatgtttaccctataaatggcttagaaccacatgctctattggaataagggtcagttgcagccagaataatatcatgctggtagggccgggtacttcctggtacatcacatcagggggtccataacgtcatgtcactacgattgatgggtgggtttggggaatgtccctggtccccagtaactctccacataaagatgttaacaggagctgggcccagtggctcacgcctgtagttcccagcactttgggaggccaaggcaggaggatcacttaggcccaggagtttgagaccagcctgggcaacatagcaaaaccctgtctctactaaaaataaaataaagaccgggcacggtggctcatacctgtaatcccagcactttgggaggctgagatgggcggatcacttgaggtcaggagttcaagaccagcctggccaacatgatgaaaccccgtctctaccaaaaaaccaaaaattaaccaggcgtggtggtgcacacctgttatcccagctactcaggaagctgaggtaggagaataacttgaatccaggaggcggaggttgcagtgagctgagatcatgccattgcactccagcctgggtgacagagtaagactctgtctcaaaaaataaataaataaaatacaacaaaataaaataattagccagatgtggcagcaattgcttgtagtcccagctacatgggaggctgaggtgggaagatcacttgagtccaagaggttgaggctgcactgagttatgatctcggcactgcactccagtttgggcgatagagtgagaccctgtctcataaaaaataaaaataaaaaaggaaagaaaagaaaaaaagtcattagcagccatcaattttgttgttgttattgtttgtttgtttgtttttgagatagagtttcgctcttgttgcccaggctggagtgcagtgatgcaatcttggctcactgcaatctccacctccagggttcaatcaattctcctgcctcagcctcccaagaagctgggactacaagcatgagccaccatgccaggctaatttttgtatttttagtagagacggggtctcaccatggtggccaagctggtcttgaactcctgacctcaaatgattcacctgcctcatcctcctaaagtgctgggattacaggcatcagccaccgtgcctggcccgccatccatttttgattcattactctcttgaggattatgtccaactttatcattcctgctactggaattagctgtggttcttctgaaaaaggctttctgcttccctccggaactagctggtttgtacagaaagtgacaacgtgatacattgacttatgtattatttgtggaatgccttgaggcaagcggttacatgagctcagcagaagagcctggaatgggcacagccctgagggtcacgtgtggctcccttggaagcatctagggagcacccaggaacgattggctgccatagtaattactatctaatttattagatatagtaaaaataaatttattactaattatcactaacgattctgattactgggtgagaacaatggtgatctcatgtatttatgtgcattacagggtgagagttctccttcctgtggcgtgcaggagattctagaatagaaactcattgaaagagtgagaggaaaacatttgtgatcttgaacctgttccgcttaaaaatacatgagggaggccgagtgcggtggctcacgcctgtaatcccagcactttgggaggccgagttgggtggatcacctgaggtcaggaattcgagaccagcctggccaacacggtgaaacctcgtcactactaaaaatacaaaaattagccaggcatggtggcgggcacctgtaatcccagctactcgggaggctgaggcaggagaatcacttgaacccagggagtggaggttgcagtgggccgagatcatgccactgcactccagcctgggtggtacagcaagactctgtctcaaaataagtaaatagataaatcgattaataaaaaatacatgagaggacgggtgcagtggctcatgctggtaatcccagcactctgggaggccgaggtgaaaggatcatctaaagctgggagtttgagaccagcctgggcaatatagcaagacccctgcctctacaaaaaatgtagctgcacctggtggcacacacccagctacttgggaggctgaggcaggaagatcacttgagtctgggaggtggaggctacagtgagctgtgattgcaccactgcactccagcctgggtgacagagcaagacctcatctccaaaaaaaacacaaataacaaaaacgtgagggtccagagaaattaaagctgcgggctgggccagcagcagtggtggtgggatggtgaagccagcgaccctagcagagaaatcggggacaaaggaatcagtgctggagacctgcagaggaggcgtcctggacccagacaggaaaaggaggtgatgtaactcaacgaagcaaggaaatctcgtggaaatgagtaaggtgacaaagagaggccacccagggggagacccagacattgagggtagcttcccttttattttctgtaaagttgctcaaaaaccttaaaacacagttgaccaacagctgctgccaagaacattgtgaaaaggtttctgggtaaggaaatggccctgcgaatgggaaggttccgctctggtgggatcagagatgaggtgtccagggctgggataggcaggccaggatagcaaagccctggcagacagaggctccattttgggtgtccttcattcccttcttttttttttgaggcggagtctcgccctgttacctaggctggagtgcagtggcgcgatctcggctcgctgcagcctctgcctcccgggttcaagtgattctcctgcctcagcctcccaagcagctggcattacaggcatgtgccaccacgcccggctaatttttgtatttttagcagagacaggctttttccatgttgcctaggcaaatctcgaactcctaatcaagcagtccacccgccctcagcctccttcattcacttctgagatgattcagtttctgtctctgttggcagctgggaaagttctgaaaaaagaatgaagagcagtccaggcgtggtggctcgcaactgtaatcccagcactttgggaggctgaggtgggcagatcacctgagcttgggagttggagaccagcctgaccaaaaaggtgaaacctcacctctactaaaaatacaaaaattagctggaaatggtggtggatgtctgtaatcccagctactcaggaggctgaggcaggagaatcgcttgagcctgggaggcagaggttgcagtgagctgagattgtcccactgccctgcagcttgggtgacagagtgagactctgtctcaaaaaaaaaaaaaagaaaaagaaaaagtaaagacaatggcatcagacaaattctggctctgaaatctaggctagctggcctggtgactttttttttttttttttcatagagatggggtcttgctatgttgcccaggccgggttttgaatttttggcctcaagccatcctcctgcctcagcttcccaaagtgctgggaatataggtgccccactttttttttttttttttgagacagagtctcattctgtcacccaggctggagtgcagtggcgcaatcttggctcactgcaaactccacctcccagattcaagcgattctcccacctcagcctcccgagtagctgggattacaggtgcccaccatcacacccagctaagttttgtacttttggtagagacagggtttcaccatattggccaggttggcctcgaactcctgacgccagatgatctgcccgcctcggcctcccaaagtgctaggattacagacataagccaccgtgccctgcccttttttttttttttttaagagtctctgtctgtcacttaggctggagtgcagtggtgcaatcatagctcactgcagccacaaactcccgggctgaagcaatagatcctcccccttcggcctcctaagtagtggctgggattacacgggcatgccaccacacccagctaatttttaaaaagtttttgtaaagacgggggttttcctgtgttgcccaggctgaactcaaactcttgagctcaacggatcctcctgccttggtctcccaaggagctgggattataggcgtgagccactgtgcctggccctggtgaccttttgacagtagccccgccttccccagcgtgggttttgccctctgtaatgttgcgtagggctgttgcgatcacagaaggtggtggagtgtgagtacttctggggtacttgccggaggctggggatttgtggaggtgtgtggctcagttttattccaggaaaccgtggccagacgggcctgtcagcaccttccctttcatctacagttcctcaattgggggggtgtgagttgtttcataagcccctccccctcatttcttgcaggaaagtggtaatgcaaagaaacttttattttatccacatctatattctttgtaaccttttaaaataagatacttggcctggcgcctgtaaccccagcattttggcaggctgaggcaggcagatcacttgagttcaggagttcaagaccagcctggccaacagggtgaaaccccacctctactaaaaatacaaaaataagctgggcacggtggcgcacgcctgtaatcccagcacttttggaggccaaggcgggcagatcacctgagttcgagagtttgacaccagcctgaccaacgtggagaaacccccgtctctaataaaaatacaaagttagccgggcgtggtggcgcacgcctgtgatcccagctactcgggaggctgaggcatgagaattgcttgcactcgggaggtggaggttgcagtgagccgagagggttagggttagggttcaggaggaaggaaaaacctagggtgtttagccccggaaatctctcttttgatgttcactgcctcgaggttcttgctacctcttgctccaagtcacagcctggccccagcaggtcatgccagagcccccagcctgtcctctgccaagcggtggtcctggcagctgcttagactcccactccgaagctggatcatctgtagatgggaagtgtttgcataaatggggccaaggagtgctctccagctctttggtaaagaagcctgacagccgccaaggcttttacttttattttccatccttcacccgggaggggaagcaagtatcactgtgttctgatttggcagagccacctgtcattgcaacttgtcaccagggcaacaagtcaccatcttagtaaggcagccaatgagaagcatgggtttcctctggtggtcggtttcacagaacggcaacagtttctaggcatccgagtgataccagaactctttgttcaaataaggcttcaaggacagatgtatagtgacagagaggagaacaagctggtagcaattatgaattttcacaaggaaaactagttgtggggagcagaaaaatcctctctgtggcttcaggaacaaagaggccatttcccttgggtctttaggaaaccccttttttccaactataatttattttattattattttttgagatggagtttcgctcttgttgcccaggttggagcacaatggtgcgatctcggctcactgcaacctctgcctcccgggttcaagcgattctcctgtcttagcctcccgattagctgggattacaggcgtctgccacaatgtccggctgatttttgtatttttagttgagacagggtttcagcatgttggccaggctggtctggaactcctgacctcaggtgaacttcccccctcggcctcccaaagtgctgggttacaggcgtgagccaccgtgcccagcccagcgataatttaaattacaagtatttggcccggcattagtggtgcatgcctgtaatctctgcactttgggaggtcaaagaccaaggatcctggcaacatatgagaccctgtctctacaaagaagaatcaattttttcaattaactgtgggtggtggtgggtgcctgtagtcctagctactcaggaggctgaggcaggaggatcgcttgagcccaggagttggaggatgcagtgagctctgatggcaccactgcaccccggcgtgggagatcgagacagagtgagacgccatctctaaaaaataataataaataaataaatacgtatttggtggtgatggttacaagatcgtgtgcagaattttagtgtatataaatgccaccttaataaaaactgatttttagaaaataattcttgggaaaaccaaaacgtgcagcaggcaggtagacacatttgtcaaaatgcatcaaactcagtaacagcagaccaaagactgcctgttctcacttataagtgggatctaaacttcaggtactcatggacataaaggtggcaataatgaacagtggggattgccagggaggggtgaggaaaaggggcatgagggttgaaaatctaactgttgagtgctgtgctcaccatctgggtgacagagtcgctcataccccaaacctcagcatcatgcaatatactcaggtaggagactggcacaggtatcccctgaatctaaaataaaagttgataaagagggtcccgggcgcggcggctcacaactgtaatcccagcactttgggaggccaaggcgggcaggtcgctttgaggccaggagttcgagaccagcctgggcaacatggtgaaaccccgtctccactaaaaatacaaaaattagatgggcgtggtggcgggcacctgtaatcccagctacttgggaggctgatgcaggagaatcgcttgaacccgggaggcggaggttgcagtgagctgaggtcgcaccgctgcactccagtttgggcaacagagcgagactccgtctcaaaaaaatgaaaaaataaataaaagttgataaagagggctggccatggtggcttatgcctgtaattccagcactttgggaggccaaggcaggcagatcacttgaggccaggagtttgagaccagcctgggcaacatggtgaaaccccatctctatgaaaaatacaaaaattagttgggcgtggtggtgtgtgcctgtggtcccagcactttgggaggccgaagtgggtggatcacttgaggtcaagagttcgagaccaacctggccaacatggagaaaccctgtctctactaaaaatacaaaaattagctgggtgtagtggcgcgtgcctgtggtcccacctactcaggaggctgaggcaggagaattgcttgaacccgagaggcgaaggttgcagtgagccgagattgtgccactgcacgccaacctgggcaacagagtgagaccctgtctcaaaaaaaaaaaaaaatttaaaaagttgaaaaagaaaaacaatgcatgaaaccaaacacataagataggcacattctactgtatgtaaattacacatcaacaaaatggatttttcaaaaatcactgtttctgggattttattagatagcatttggtacaaaattgaggtcagtagagctcagttttactggtagaaatcagaggaagttaaaggattttatgttttagaagagaattaaggggcatattgccttttcctgctactgaaccaagagttttcaaactgggtccctagggaaccctagaggttccatgcctaccctgctttctcctcaatctgtcatcacagctgcccactccttttgtgtcgttcaaaaggttttacccgaagagttctgagaacaaagggtttgaaaatcagagctctcaaaaaatgatttttctttttcttctttttttttgagacgggatcttgctttgttgtccaggctggagtgcagtgatgccatcatagctcattgcagtctcagccttcctgggctcaagtgatcctcacaccccagcctcctcagtagctgggactaccagcatggaccaccacacccagctaatttttttccattgattgattgattgattgattgagaccaaggctcactctgtcgcccaggctggagtgcagtggtgcaatctcagctcactgcaacctccacctcctgggttcaagtgattttcctgcctcagcctcccgagtagctgggattacaggtgcccgccaccacgcccatctaatttttgtatttttagtagagacggggtttcgccatgttggccaggctggtctcgaactcctgacctcaggtgatctgcccaccttggcctcccaaagtgctgggattacaggcgtgaaccactgcgcccggctttttcccttttatctttgtagagatggggtcttgttatgttgtccaggctggtctcaagctcctggcctcaagcgatcctcctgcctcagcctcccaaagcacaaggatgacaggcgtgagccactgcacctggcaataacatggtttctgtctcttttcaagctaccctttgtccagggtgtgtcaaagagtagctcaagaagagacagaagtcatgtcttcaaggaggcaggatgagctgggacttgagcatggggaaatatctggacaaaaacggacttgaaagttcctgctaggaccagaagagacagggagcctgtggaattcacttttcccctctagatcccctgtcccacaaatttgctttcagttcctctaaatacacacactccattctgcctcaggtccttggaacatgcagtcctctccctccacccagaaggccctccctaactgcctctcctggttaacccttctgcatcctccaccctcccttcaaacatcttttcctccccccaaaatactttctggattcccccatgtggggttgatttttaggtcagaggttctcacggaaaagggttcctctccttgggagatggaagggtccttgaggctgatggctgattgagcattctattggtgttttttgttgttgtttttttgttttcttttttttagagatggggtcttgctctgttgtccaggctggagtgcagtggtgcgatcatagctcactgcagtctccaactcctggactcaagcggtacttctgtctcagcctcctgagtagctgggactacaggaagccaccaccatccctgcctaatgttttcttacgttttgtacagagggagggtctcactgtgttggccaggctggtcttgaactcctgggctcaagtgatccacccacctcggtctcctaaagcactgggattacaggtgtgagccatggcgcccggacttttttttttttttttgagatggagttttgctttttgttgcccaggctggaaagcaatggcacaaccttggctcaccacaacctccgcctcccgggttcaagcaattctcctgcctcagcctcccgagtaactaggattacagctacccacctggtgtgccaccacgcctggctaattttgtgtttttagtagaaaaggggtttctccatgttggtcacgctggtctcgaactcccgacctcaggtgatccacccgcctcggcctcccaaaaggctgggattacaagcatgagccaccgcgcctggcccattgcccggcctttttattgctgttctgttggtgtctgcctttccctgactgacaagggccaactcgtcccgggcaagggcagcatccctctgcttcttagtgtatgcatggtgtttaacacagcatatggaacataatagttgctcaataaatattgcctgcgctttgaacctgtgtgcaccgttgcatttacacagggctttaatacacatgcatcatgttgattgaaatataaatacatagagaaaattgtgcaaatgagagttacagctgaaaacttttacaaaattcccccctcactaggggccttcctggtatgcttttatcaccactatctctgattccccaggactcttccatcgtcatttccgacagcataaattagttttgtttgtatttcatttattattattatcattattgtgagacggagtctctctctgttgcccaggctggagtgcagtagcatgatttcagctcactgcaacctccacctcttggttcaagcgattctcctccctcagcatcccgagtagctgggattacaggcacctgccgctacacctggctaatttttgtatttttaggtatttttttttttttttgagacggagtcttgctctgtcgcccaggctggagtgcagtggcgccatctcggctcactgcaagctccgcctcccgggttcacaccgttctcctgcctcagcctcccgaggagctgggactgcaggtgcctgccaccacgcccggctaatttttttggatttttagtagagatggggtttcaccgtgttagccaggatggtcttgatctcctgaccttgtgatccgcctgccttggcctcccaaagtgctgggattacaggcaggagccaccgcgcccggccccctttttttttaataaatggatttgtatggtatgttctttttggggtctggcttctatgctaacatatgttcgtgagaatcagccacatggttgggtgtagctgtaatccatggacagttgtctcattctcactcatcaccacataccaggggtacaaaaaaatgttttctgtaacgagtcagatagtaaacattctcagctttgggggccctactgtccaaccactctacagctgctgagctctgccatggacatgtgatagcagtcactgatgatatattaaaaaatggggccaggtgcagtggctcatgcctatagtctcagcactctgggaggccaaggcgggcggatcacttgagatcaggagatcgaagccagcctggctaacatggcgaaatcccatctctactaaaaatacaaaaattagccggacatggtggcgcacctgcctataatcccagctactcgggaggctgaggcaggagaatcgctttaacccgggaggcagaggttgcggtgagccaaggtcgtgccactgcactccagcctgggtgacaagagcgagtctccctctcaaaaaaaagggggtagcaaactgtgtgtgtgtgtttgtagggacaggatctcactatgttgctcaggctgccctcaaactcctgggctcaaacaatcctcctgctttggtctctcaagtagctaggatgacaggtgcctgccactgagcttggcaattttttttttttttgagacagagtttcgctcttgttgcccaggctggagtgcaagggcaccatcttgactcactgcaacctccacctcccgggttcaagcaattctcctgcctcggcctctcaagtagctgggattacagtcgcgtgccaccacacccggctaattttgtattgtaagtagtgatggggtttcaccacattggccaggctggtcttgaactcctgacctcaggtgatccacccgccttagcctcccaaagtgctgtgattacaggcatgagccaccgcacccagctgacaatgttttaagaaaattttctttatggactttttatgaaaattatatgaatttgaattttatatgatttctattttcactaaacattacaaatattttttggctaggcacagtggctcatgcctgtaatctcagtgctttgggaagctaaggtggcaggatcttttgaggccaggagtttgagaccagcctgggcaatagagtgagaccccacctctacaaaaaaattaaaaaaattagttaggtgtggtgacacatgccgtagtcccacctactcaagaggctgatgagggggggattgcttgagcccaggagtttgaggctgcagtgagctatgattgcaccattgcactccagcgtggaaaacagagccagactgtgtcttttttaaaaaaaaaacaacttttttttccctatggtttaaaaatgtgaaaattggcagtgcctcaaaaagttaaacatagaattaccatatgatcaggcagcactactcctggacatacgcccagaagaattgaaagcaggagctgcaaacagatatttgcacatctatgttcagagcagcattattcacaatagccaaaaggcagaagcaggccaggcacagtggctcacacctgtaatcccaggactttgggaggccgaggcaggcggatcactccagatcaggagtttgagaccagcctggccaacatggcaaaaccccatctctactaaaaatacaaaagaaaaaaaaattagccaggtgtggtggtggcacatgcctgtaatcctggctactcggaggccgaggcaggataatcacttaaacccaggagtcagaggttgcagtgagccaagatcgtgccacttgcactccagcctgggtgacaagagcgaaactctgtctcaaaaaaacaaaaaacaaaaaccttttagatccgccatctgtggtggagccgccaccaaaatgtagattttcctgaaaacccttacagggaagaccaccaccctcgaggctgaaccctcagatatggtagaaaatgtaaaggccaagatccagggtaaagaaagaattcctcctgatcagcaaagacaagcactggaagatgggcgtactctgtctgactacaacattcaaaaggagtctcctcttcatcttgtattgagaattcgtggtggtgctaaggaaaggaagaagtcttttttttattttttttgagatggagtctcgctctgtagctcaggctggagtgcagtggtgcaatctcggctcactgcaacctctgcctcccgggtcccagttcaagcaattctcctgcctcagcctcccgagtagctgggattacaggcacgtgccaccacgcccagctaatttttgtatttttagtagagacaggatttcaccatgttggccaggctggtcttgaactcctgacctcgtgatccacctgcctcggcctcccaaagtgctgggattacaggcctgagccactgagcccggccagaagaagaagtcttacctgcaagacgaataagcacaagagaaagaaggtgaagctggctgtcctgaaatattataaggtggatgagaatggcaaaattagtcaccttcgtcgaggttgcccttctgatgaatgtggtgctgcagtgtttatggcaagccactttgacagacattattgtggcaaatgttgtctgacttactgcttcaacaaaccagaagacaaataactgtatgaattaacaaaagacggccaggcgcagtggcttacacctgtaatcccagcactttgggaggccgagacgggcggatcacaaggtcaggagatcgagaccatcctggctaacatggtgaaaccccgtctctactaaaaatacaaaaaaattagctgggcatggtggcgggcgcctatagtcccagctactcgggaggctgaggcaggagaatggagtgaacccgggaggcggagcttgcagtgagccgagatcgtgccactgcactccagccagggcaacagagtgagactccatctcaaaaaagaaagaaaacccacaaaagacgtgaactaacaaaaacaaacaaacaaacaaaaaaacaaaacaaaagctggaagcaacccaagtgtccatcgatggatgaaggaataaacacaacgtggttcatccacacaagggaatgtgatacagccatggaaaggaaaacagttctgactcaggctacagcagggatgaaccttggggatattatgctcagtgaaataagcagatacaaaaggacaaacactgtgtgattccactcctaggaggtccctagagtcatcagatccatagaggcagaaagcaagatggagggtgccaggggctggggagagggatagggagtgagtgtttcatggggacagagtttcagtttggaaagaggagaaagttctggagatggacggcagtggtggctacataacaacatgaatgtgcttattgccacagaattgtgctctgaaaaatggttaaaataggctgggcatggtggctcacacctgtaatcccggcactttgggaggctgaggcgggtggatcacttgaggtcaggaatttgagaccagcctggccaacatggtgaaaccccatctctactaaaaatacaaaaaattagccgggcatggtggtgcacgcctgtaatcccagctactcgggaggctgaggcaggagaattgcttgaacccaggaggtggaggttgcagtgagccaagattgagccactgtactccagcctgagcaactgagtgagactctgaaacaaagaaacaaacaaaagcaatggttaaaatggaacaagatggtgcatacctgtagcttcagctactggggagtccaaggtgggaggattacttgaagccaggagtctgacactagcttgggcaacatagcaagaccccgtctcaaaaaaaaaaaaaaaaaggccgggcacggtggttcacgcctgtaatcccagcactttgggaggccaaggcgggcagatcacaaggtcaggggatcgagaccatcctggctaacacggtgaaactccatctctactaaaaaaaaaaaaatacaaaaaattagctgggcgtggtggcaggcgcctgtagtcccagctacttgggaggctgaagcaggagaatggcgtgaacccaggaggcggagcttgtagtgagccgagatcgcgccactgcactccagcctgggcgacagagcaagattccgtctcaaaaaagaaaaaagtaagttataatggtaagttgtatgttatatgtattttaccacaaaaaggcccgttgtactggaaacaaagaacaaataaaaatgtaataaccattccaagctcatgggtggtccaagaagaaacatgagctggaccttggcccatgagcaatggctttccaacttctgttgcaggtgatgccattgatggaataaaccatgatttttctttcttctttttgagatggagtcttgctatggtgcccaagctagtcatccaggatggagtgcaggggcacgatctcagtgcactgcaacctccacatcccgggttcaagtgattctcccacctcagcctcccaagtagctgggattacaggcacacgccaccacgcccagttaatttttgtatgtctaatggagacagggtttcatcatgttggccaggttggtctcaagctcctgacctcaagtgatccgcccgccttggcctcccaaagtgctgggattacaggcgtgagccaccggccataaaccatgattttatttaccagttctattgctcatgggcatttgggtatgaatgtggtatgtcattctcacccagagacataattattattactattttagagaagtggtcttgctctgttgcccagactggagtgcagtgctgtgatcataagtcactgtagcttcgaactcccgggctcaagcaattctctcacgtcagcctccttagtagctgggactacaagtgcttgtccgcaccatgcctagcaagaggcattaattttgtcatgtttgcatcagccacccttgcatgcaaaactctgcttgtctacctgttcctcagaccacagcccctggcattatccctggggcaccacctcctgaccagtctctggacatgaagacggaggccctgttggaagtgggaaggctcccttcctcctccagcccttactgtctgctcaggggcttcctcttggccccggatgtgggaccggagggttgggggcccagggacttattagccaagccaggaagccccaccccaagaggcctcaaagaaagagctgcggtgcaggaattcgtgtgccggatttggttagctgagcccaccgagagggtaagtgacagctgctcctgcgcttgccatggcaccagcggggaggctggggtcaaggctgagcctccatccctgtcccccacatggggggacaggggtccaggtccaggggcagatcctactccctccatgggccggatcttccccacagggcagggctgatccagctgtgggtctcttggttccctctttcagcgcctgcaggatgaaagctctctgtctcctcctcctccctgtcctggggctgttggtgtctagcaagaccctgtgctccatggaagaagccatcaatgagaggatccaggaggtcgccggctccctaagtgaggaccccccacttgggcaagctccccaagggtctcagagacctcactgatccctggcacagacctgactccaacccagccccagcgctcaccaaatctcatcctcaaatccaaccagatcataaattcaaccccaactccactcccaacccctccgactgtccccaccttatccacggctccaaacccaatccccgctctcactccaaaccttcccttactccaaaacacccaactcaagacagggtcctggaggccagtgagctcctatgcccacagggacctagctccaaaccaacagggctaggggaggatgggggagggaccgtttggtctcacagctccccctgtctcctttcctcctgccccccagtatttagggcaataagcagcattggcctggagtgccagagcgtcacctccaggggggacctggctacttgcccccgaggtgagtgcaggagactgttgtccaggcgcccatttctgttccaagtcccctgggaatgccccctccccgccacgttccccgtgtccagcctctactcccctaggatcttggtcctgactcccagccttctccgcccaccatctggacactggtgtccaccctcactccctgcctccagtgcccattcagtggttggagcctccagccgtccccgtccccacccccgcccccccaacccccctccgcgctccccacccccctcccgctcccaccctcagcctcccagctcagagtccacgctcctgtgttccgggctgcaggcttcgccgtcaccggctgcacttgtggctccgcctgtggctcgtgggatgtgcgcgccgagaccacatgtcactgccagtgcgcgggcatggactggaccggagcgcgctgctgtcgtgtgcagccctgaggtcgcgcgcagcgcgtgcacagcgcgggcggaggcggctccaggtccggaggggttgcgggggagctggaaataaacctggagatgatgatgatgatgatgatgatgatgatggagcggatctgagccctgcgtggtttctttagtaggcccggagggactgatctagcgtctccaagagagtggggcgcgtagctgctggagggggcggggacaccgcgactttctactgccccatcgcccttcctcctatggggtctccaactgcttcctccgaaaatagggcctgaacttcctctagtgacgtccccacccaaggctcatggctgccttcaagaggtgacgtctcatctttgaggctaccttgacgctcaccctggggtctccgacctccccaggaagtggctgggtccttttcccccagtcctcataatgaggcttcatcgaggacctgggtcagtctgggcagtggacgggaccctccagggccccaagactccaggagccccaggtcagggtggaaccctgaatcatgtctcagcccagagctggaacctgtacccctcacttcctacctgcaaggaggaatccccaaggcacaggcaaagttgggttacggagagtcagggacgcctacctgacgtcacgcatcatcacaagctcacgttttcacacaggcaagtgcagttgtgagtagttagttacaaccagatacacgcagggtgcttaccccttcctggatactagattatgaaaacacagagcaggggacttgtctgctcctagatcccccccagggtttcgtttcttcccttcccttcccctcccctcccctcccctcccctcccctcccctcctctcccctcttctcttttctttctttctttctttttttttttttgagacagggtctcgctctgttgcccaggctggagtgcagtggtgcaatctcggctcaccgcaacctctgcctcctgggttcaagcgattctcctgcctcagcctcccacgtagctgggactacaggcgctcgccaccatacctggctaatttttgtatttttagtagagaaggagtttcaccatgttggctaggttggtcttgagctcctggcctcaagcgattcacccgcctcagcctcccaaagtgctgggattacatgcatgagccaccgcgcctggcctattttttaatttttattttcgagacaaggtcttactctggcgcccaggctggagtgcagtggcacaatctcggctcactgcaacctctgcctcctgggttcaagtgatattcctgccttagcctctcaagtagctgagattacaggtgcccaccaccatgcccagctaatttgtatttttagtagagagcgggtttcaccatgttggccaggctagtctcaaactcctgacctcaggtgatccacccacctcggccttccaaagtgctgggattacaggcatgagccactgcacccagcgcccccagggtttagaatagagcatggaacacagtagacgttcagtaaatgtctgttgatcagtagccacatgtgcacttagatacagcaccgacgtgcacatactgcacatgcacacacagctatacacagccacgtgcacacacagagtacacaacccacctaccacggccacatggagacaccacatccacagacacacccatgtgcccctagacactcttggacacagaaaggcaccacccccccggccaatgcacggagaatcgcagatttgactatggtgggcagagatgatgcaggacacaaacacacacatgctccaggcagactcttgcatttctgactctagtccccactgcacctggataagtatctgataccctagtgcagcgatccccaacctttttggcaccagagactgttttcatggaagacagttggtgtgtgtatggggtagggggggagcggggatggtttctgggtgattcaagcgcattacatttattattcactttatttttattattatgacattgtaatatagaataaaataattctacaactcaccataatgtggaatcggtgggagccctgagcttgtgttcctgcaactagatggtcccagctgagggtgatgggagacagcgacagattaccaggcatttgattcttataagaagtgagaaagctacatccctcaaatgcgcagttcacgatgggattcttgctcctatgagaatctaatgctgctgctggtctgacaggaggtggagctcaggtggtaatgcgaatgatggggagtggctgtaaatacagatgaagcttctctcgctcgcccaccactcacctcctgctgtgaggccccgttcccaatgcccggtggctggggacccctgttctagtgggcaaaagcctcagcatcccccgcctcagctccctggggcacaaattcaggtgattcggggtccagttctacaggaagcctgacccaggagtcttgccatccagtccctgatttcccaccacagacttcagaattcctagcacctagtcttgaaagggatcccagactcaaatgtcacacctggacaacagatgatagagtgaggttctggtttgcaggatgttttggactctcctcccactgccacccaccccctgtgatggtcccagccccctgtctgatgctggtggccatgagcagagattacaaccacttctggtgccagggaccccacccagactccagcccagggattcccttcccagaccctctctcctgactccacagtggtcatgggggtagggcaggaccactgagttagaagcatggccagggccagagagggtgagtctagtgccttgtgtgtgtccctgccccttactgctgtgtgtgtgtgttgggggcggggatgctccattgtccccagaactatttgtctccacccccatccaatagtcctgtatctgaaacctaagagggctctcttcaggttcctcaattccaacatagacattctcctgccccagagtgcagacttggaggtcatatctgcccaggtgatgtggacaggcaaaccccctattagagcctcaatttcctcaatagctaatgcctagatcccctgtggtaggcaagatatcctcctccctcctccctcctccctccctccttcctcctcctcatccttctcctcctcctccttcttcttcttcctttttgagatggagtctcactctgttgtccaggctggagtgcagtggcacgatctcagctcactgcaacctccacctccaggttcaagtgattctcctgcttcagcctcctgagtagttgggattgcaggcgcccaccaccactcctggctaatttttgtatttttagtagacacggggatttcgccattttggccaggctggtctcaaattcctgaccttaagtgattcacctgcctcggccttccaaagtgctgggattacaggcgtgggccacagagaccagccaaggcaagattcttctgcttgcaagtacaacagaccccacttcaaactagcttgggcaaaactaaaaggaagtttcttgtttgtgtaactgacaagcccagggttagaacaacaggttcaggtatggcttggaaccagggtctcaaatgatgtctccaggacccagacttcctctcgggtctgattttctcagcactgcctttgctctcaagtaaattcttccctgtcacagctcccattacatcctcccattgtggcagccctagtgagggctggaaaaaaaagagaatgctttttcccccgtggttaaaccaataaaaatcccagaccagcgtttcattggctggatcttgctcaaatgcccgcctctctgcccaatcttagactctggttggctgggtctggatcatttgtccactgtaaaccaatccctagcttatggtttgctggatctagcacacattttctttcttaaaagaaaattgagaatgttaccctatgaaagggacgggtgctggtcaggcagctttgcagatgtttcccacatgacatgattgcttgtgggcctctggtttagcgtgacctttttctcaaaggaagtccagagcctggagccgcgtctcagccccacccaagcccgggaaatgtgcaacgctgtggctccaccccctgtgcctgtccatcaaggcagagcccacatccaattggtccgtctgctccattagaaggcggtcctatagctcagtaactgacttctttctaagaccaaatggagcagctggcatgaagtcattatcaaattgatctttcttggagacacaggatttggcaatattttaggaaacagaactttatcctcaccagatctcgacgctcatttctcaacattcaagttgtctgaaatttaaccacatatttttaaccaaaacatcatcactttctgcacataagacagtcttatacttgttttttcttcttttcttcttccttccttccttctttcttctttcttcttttttctttttttttttttttttttgacggagttttgctcttgttgcccaggctggagtgcaatggcgcgatctcggctcactgcaacctccacctcccgggttcaagtgattctcctgtctcagcctcccgagtggctgagattacaggcgcctgccaccacgcccagttaatttttgcatttttagtagagacagggttttatcatattggtcaggctggtgtctctaactcctgacctcaggtgatccgcccgcctcagactcccaaagtgctgtgattacaggcgtgagccaccacacctggccagaaaaaaataaaaataaaaatgtatgcctgtaatcccagcactttgggagaccaaggctggaggatcagttgaacccaggagatcaagaccagcctggacggcatattgagaccctcatctctacaaaaaataagaaaaattagactgggccacggtggctgatgcttgtaatcccagcactttgggaggccaaggcgggtagatcacgtgaagtcaggagttcgagaccagcctgaccaacatggggaaaccccgtctctactaaaaatacaaaattagccgggggtggtggtgcatgcctgtaatcccagctacttgggaggctgaggcaggagaatgacttgaacctgggatgcggaggttgcagtgagctgagatagcgtcattgcactccagcctgggtgacaagcacaaaactccatctcaaaaaaggagaaaaattagccaggtgaagtcgtgcccacctgtaatttcagctactcgggaagccgaggacgaaggattacttgagccagggaggtcaaagctgcagtgagccatgatcacgctgctgcaccccggcctgggcaacagagtgaaaccctgtctcaaaaaaaaattattaaaaaacatttaaagagacagggtcttgctatgttgctcacgctggtctcaaactcctggcctcaaatgatcctcctacctcagcctcctgggtagctgggactacagagcgagccaccatacccagctactttgtgccttttgtaaccccagttttcaagatcagataaacacaaagtgaactaagacaccttctagacagagtgcgggcatgtgaacgcatgcttgtgtctatttttctgagtgtcacaatgcaaatagtatgcaaatgagtttgtgatgtgtgtccgtgtgcagacctgtgtgtgtacatgtgtgagagagagtatctgggtagataagcagatggatggatgagaatgagaaacctggagtttccaggtgcagaggaaactgttcctccagggttcttttttgagacagagtttccctcttgtcacccattctggagtgcaatggtgtgatctccgctcactgcagcctccgcctcccaggtttaagcgattctcctgcctcagcctcctgagtagctaggattacaggcgctcgccaccacgcccagctaatttttgtatttttagtagagacggggtttcaccatgttagccaggctggtttcaaactcctgacctcagatgatccacccacctcagcctcccagagtgctgggattacaggcgtgagccaccgcacccagcctcctccagggttgtataaaagcaggggatttggggagggagggaaggatgtgggtctgtcctcagtcccagatgtgggtgtggcgttccagtggttagttcccgttgcctcacatctgtgcttttcctccacggggacttgtagaagtagaagaacttcttgggggtggagctgaggggtggagctgaggctggagggaggaaggtgtggggggacccaggggtcctgtctccaagcctggttgctcttacgcgaaaagttgggacactgaggtgtcacagcttctcttttgaaatggagaggaggtaggagggtgaggtccatccaggtagacacagacacacacagagaccacagcttcctgtaacatttccgagtgtcgaattccatctcccggtctagaggtttttcttcttggtccttcctgagacctcttggctcccaagagcctcttgatcggggcaggaatgagggtgccccagggtgcgagagtcgtggatccctgaaaagaggaggctgctccccctctttcttccccccacctccagatttcctcatctgcccacaccttccggtgggcggggacgtgtatggacaaatttgcgggctggggaccatggaagtggaggaaatctacaagcaccaggaagtcaagatgcaagcaccagccttcagggacaagaaacagggggtctcagccaagaatcaaggttagggaactcgaggtggaagggaggggttaagaaggagagattggggggccgggggcttttgctcatgtctgtaatcctagcactttgggaggctgaggcgggaggattgcgtgagccctggaggtggagactggcctgggcaacatagggagactctgtctgtaaaaaataaaaataaaaaaagaaggagagttcagatgggagaggtaaggggtcaaaggtgggggccgggggctccttcccctccaagatgtgtggatgtgtgtgtggatgtgtgtgtggtgtgatcactcaaactctcacacacccgctccacttaaccaaaaagcagattttagcttctcactccttatctttcaccccctacaatttattgagtgcaaagggttgggtaaaacaagatcccggatccactctccacaccacagagctctgagcagatctccaacccctcccaggtgcccatgacccagactatgagaatatcaccttggccttcaaaaatcaggaccatgcaaagggtggtcattcacgacccacgagccaaggtgagcagacacccacctgctcacatcccatcaccttgggaaggggcaggtgggcgggcaactgcagggcccccggggctgcgtggaagggaggaagcgatggggaaggaagaggtgacagctgttgacgtgctaatgaggtctgttgatgatgacaatgttggggaatgctggagagggggtctgtgatggtgacggtgttagatcgctgagggtggctggtggtggcagtgttgttgacgatgatgacaagctgcatgaccacagctgctgatggttttgagaggagcgaggtgtccatggtgttagagacagtgaggatggtttgagtggtggtgctggcccctcaaggtcactttgctgcctctttgctccagtcccagcccagtgcaggccgccctcagactccacccaggtcccctgctggttgtacagagccatcctgagcctgtacatcctcctggccctggcctttgtcctctgcatcatcctgtcagccttcatcatggtgaagagtgagtacttcttgggaggagggtgctggggggcctagactttctcccttgtccttctctctctctctccctgggtgcttcaaggattttcctgcccctcctgaacagatgctgagatgtccaaggagctgctgggctttaaaagggagctttggaatggtgagcggagggtctgagggagacccgtggggtcatggtgggggtctggagagggatggatgcacagacacccctgtttcatgccctcagtctcaaactccgtacaagcatgcgaagagagacagaagagaggctgggattccgttcagcagagcatcaccatggtcaggagcaagattgatagattagagacgacattagcaggtgcctgtgtagtctcgccttctatgggggttatttgtcaccaatgcccggagctgagctgggggcaggggattcaggggaggagaaagccggggtcctaccctcccaaagctcaagttgtggaggggcgatgggtgttaccatctgggttgctctgtgggtattgaaaggctcctgggaaccccaaatccatgggctctgctgtaccccagggtgggtgtggggcagggggggtgcttccaaggaaggtgggggctttgtttgaggctccaccgcagcttgacttatctgttcccacccaaccctccccgccccctaggcataaaaaacattgacacaaaggtacagaaaatcttggaggtgctgcagaaaatgccacgtaagttggcgccccgacaggaggtggaggagggtgggtggggcttcagatttagccccagctcctctcccaggggcgggatctgcctcactgtgggtctctccccatccccagagtcctcacctcaataaatgagaggacattgtggcagccaaagccacaacttggaagatggggctgcacctgccaacgaagacgggaaatgaccccccccccccagcctagtgtgaacctgcccctcgtcccacgtatagaaaaacctcgagtcatggtgaatgagtgtctcggagttgctcgtgtgtgtgtacacctgcgtgcgtgtgtgtgcgtgtgtgcgcgtgtgttcgtgtatgtgcgtgtgtgcgtgcgcgtgtgtgtgcattttgcaaagggtggacatttcagtgtatctcccagaaaggtgatgaatgaataggactgagagtcacagtgaatgtggcatgcatgcctgtgtcatgtgacatatgtgagtctcggcatgtcacggtgggtggctgtgtctgagcacctccagcagatgtcactctgagtgtgggtgttggtgacatgcattgcacgggcctgtctccctgtttgtgtaaacatactagagtatactgcggcgtgttttctgtctacccatgtcatggtgggggagatttatctccgtacatgtgggtgtcgccatgtgtgccctgtcactatctgtggctgggtgaacggctgtgtcattatgagtgtgccgagttatgccaccctgtgtgctcagggcacatgcacacagacatttatctctgcactcacattttgtgacttatgaagataaataaagtcaagggaaaacagcgtcgctatgggacctgttactggggcaaggggaggggttttgggacctggggagagggagagtctgcacgtgacaatgaccccggggcaccagggtgggcgagactgagtgccctgcgtgagtacctgtgcatctgtgaatgagtaactcattccctgtgtcttccctgtgtcccagagtgggtgcccctgagcatacaacatctccctgagtgtacctgggaccacggatatatacaagccctaagcgtgtacccacgtgtgtaattgtgcccgtgagtgtatctatgccattgagcatgtatccatgagtgtacatgaccctaaggtactatgtccaccgctcatgcatgcacttgatttgttgttgttgttgtttgtttttgtttttttgagacagggtctcgctctatcacccaggctggagggcagtggtacgatcatgactcattgcagcctcgacctcctgggctcaggcgatcctcttgcctccgcctcccgagtagatgggattacaggttcacaccaccacacctggctaattttttttaaagaagtgggagtctagctatgttgtccaggctggtctcaaactcctggcctcaagtgattctcccacctccgcctccgaaaatgctggggttacaggcgggagccaccgcgggccacatggatgcacttgagacaattgaacccatccccaaggacataggagtgcctggaaaagccaacaggtgtgtccatgtgcaagggtatacattggcccattgtcatacgtgcgccctgagcaggtgactaggcctgcaagcgtcccctccagcgtgggccacccagagccagcgagaccctggccacgcgcggagcagccatcacggccgtgggccacgtccctgggtccggctccgcggactcgcgcgcccccctgcggccgctctcaggcaccgctgcgcgcgccccgcccacacgcctggcccgtcgagcgcctgcgcacgcagcgccttttacggcgccgtaaagcagctcggccgagcagactgctgcggttcctggtgagaccctacccacccccctgcccgcgccgggcctcgtccgctccccggccccttccccgcgggcgtgtgggtcccgggctggggtctcggcgtccgcgatcccgagcccgctcgcttcggcccccctcaggaggctgcgaggagggtgggtttctccccagtgtagaggtacggggcgagggtcgcggggccctgaccctacggcagttcagctcacttcagcccccatcgcagcccggtggtggggtcttaacgatccctctcccatctcgcgcgcccagggccctcgccacggacggatctgcatgctggggcgggggcggcccggagcccctgggacacccctccccgctggttctcccacctcccacgcagacctcgttggggtcggcttagcatccacacacctccccatgcatggtgggggcgggttctcagctgcccctccgatcccgtctcggcgcccgctccccaccccatttctcttcaggagccccctaccccatctccctctccccgcaccgacagctgatgggaggaccacagttgctcagcatccagcttcctttctggagagcacgggggtgggaggctcccaacacctctgggcccctcctcccagccttcagaacccaggcccatccgcgtctcaaaggacgaagggttcctgcgtgacacatcggagctgcctgcctgagggcttggggttgggggttacccgcccctcctgcctggccccacggatcccccctgttaaagcccccaaccctcctggcttttggtcttgacacgctcctaccccactcccaccctccaccccctttactctggctttccgcagggggccggcaggaaagttcccgagggtcgtctgtgctggagcgcagggcggggcaggagcgactgcccatatcccctcgtggtgcctcatctttgtcacctccctgccctagatctgacgcccctccccccatacactagttttctagttactcctgtaggtggcggagcgggcaggaaggcgctttcgcaattgaaccgtctgcatgcccgagggttgggtggtttcggcctcctcttctgttccccctcgtgtctctcctcccaccttgtccccactcccgctagcccgctgcctgccgagggtataagactcccccctcccttgatttatctggttacgtgtaatcgaggcgtgttttacgcgcatctctttgcaagtgggaagtcggcactggagcacacaacagtggcatgggtcgagggtgtcccagggcccctcgcggttctccctcctttcctcccggcctgctccccttcccattgcccctgacacctgcacttcctggtctccccgcagggtggcggcggcatggaggcgcgcttcacgcgcgggaagtcggcgctgctggagcgcgcgctggcgcggccgcgcaccgaggtgagcctgagcgccttcgcactgctgttctccgagctggtacagcactgccagagccgcgtcttctccgtggccgagctgcagtcgcgcctggccgcgctgggccgccaggtgggcgcgcgcgtgctggatgcgctggtggcgcgcgaaaagggtgcccggcgtgagaccaaggtgctaggcgcgttgctcttcgtcaagggcgccgtgtggaaggcgctcttcggcaaggaggcggacaagctggagcaggccaacgatgacgcgcgcaccttctacatcatcgagcgcgagccgctcatcaacacctacatctccgtgcccaaggagaacagcacgctcaactgcgccagcttcacggcgggcatcgtggaggcggtgctcacacacagcggcttccctgccaaggtcacggcgcactggcacaagggcaccacgctcatgatcaagttcgaggaggcagtcatcgctcgagaccgggccctggagggccgctgaccctgccggagataaaggatacagagagcccctccccacgtgtgtcttgtgtcttgtgtggcggccttagatccactcagtaccttgagccacagccctgccccaggctggggagggaggccaggtccgaatgtgtttacagtagagtgggggcgggtctggccatagggttggggggttgagtgagaccaggagtggtggggagaaataaacccggcaaaaggagttggtgggaaatgctggcaggttctggaatcacggttggaggctgtctgcaggctggagggggcatggggtcctgggagacgcatcaggctgagacagacgcctttagactgggggtgggcaaactgcgcaaagtgccagatgggcaatattttatgccatgtggtctttattattattttttttatttgttgagatagagtcttgctctgtcgcccaggctggagtgcagtggcaccatctcacctcactgcaaacctccaccttgggttcacgtgattctcctgcctcagcttcccaagtagctgggattacaggtgcctcccaccacacccggctaatttttgtatttttagtagagatggggtttcaccatgttggtcaggctggtctcgaactcctcatctcaggtgatccgcccacttcagcctcccaaagtgctgggattacaggcgtgagccactgctgtgccgccatgtgctcttgccccattactccgctgatgtactgaatgcaaccacagacaacatgtaaaggagtgggtgtcaccgtgtgcctagaaaacaggcagagggagattgtttgccttcttccctcatttattatatttttcagagacagggttttgttctgtcgcccaggctggagtgcagtggcagcatctcggcttcggctcactgcaagctccgcctcccgggttcatgtcattctcctgccccagcctcccgagtagctggaactacaggtgcccaccaccacacctggctaatttttcgtatttttagtagagacggggtttcaccatgttagccaggatggtctcgatctcctcacctcgtgatctgcccacctcggcttcccaaagtgctgggattacaggcgtgagccatggcgcccagccatgcccagctaatttttaaaaaatttttgtagagatgggggctcttattaggttgcccaggctggtctcaaactcttggcctcaagcaatccttccaccttggcctccgtaagtgctggggttacaggcgtgagccaaatcaaagtgtgttctgtagatcagcagtagcagcatcaactgggagttggtccataatgcagtctcaggcccaccccagagctgctgaatctgagggtgcattttagcgaggcccccaggggattcctggggaccttagattgagatgcaggctttagggtatcagaatcaccaggaggggccacgtgcggtggctcacgcctgtaatcccagcactttgggaggctgaggcaggtggatcacctgaagtcaggagttcgagaccagcctggctaacatggcaaaaccccgtctctactaaaaatagaaaacattagccgggtgtggtggcacatgcctgtaatcccagctacttgggaggctgaggcaggagaatcgctccaacccgggaggtggaggttgcagtgagccgagattgcaccattgcactccagcctgggcaacaagagcgaaactccatctaaaaaacaaaaaggtcaggcgcggtggctcacgcctataatcccagcactttgggaggccgaggcaggcggatcacgaggtcaggagttcgagccagcctggccaatatggtgaaaccctgtctctactaaaaatacaaaaattagctgggcatggaggtgcattcctgtagtcccagctacctaattttttgtatttttagtagagatgaggtttcactgtgttggccagtctggtcaatactttaaagttaattttaaagtccaggatgatacaaacacatttcccttgttaaaaaaattttaaaataagtggggtgcagtggtgcacacctggagtcccagctattcaggaggccgaggcagaaggatcgcttgaggccaggggttggtgtccagcctgggcaacatagtgagaccttgtctaaaagaatttgaaataaggccaggcgtggcgacttatgtctgtaatcccagcactttgagaggccgaggtgggcagatcacttgaggccggaagtttgagaccaacctggtcaacatggcaaaacccatctttactaaaaatacaaaaattagctgggcgtggtggcaggcacctgtaatcccagctacttgggaggctaaggcaggaggatcacttaaacctgggaggcggaggttgaagtgagccaagatcacaccactggcactccagcctgagcaacagagtgagaccctgtcttaaaaaagaaaaaaaaagtaatgtattacacctcaggcaattttcctttccctttttgttcaccacacttggttcctgataactcctcctctcccccaaggaaagttcttccagattttttgggggaaccatgatccaatcttccctgcttcctttccaccgccccccagaatgtgaacagacaggtctgttcagaaaaggaactgcagggactgtcagctgggctcccctcactggttatgagaagggccaaaggggtcggtgtcacctctagatttgtttaggatgctctgttggactgcctggtggaccagggctgagggcttggtcagggcagtctcagccatcctagcaagaggcattgagcagggtgggcttcagcacactggggagaaggtggcgtctctaggatgaatgaaaccattgagcaaccaccacacatagccccagggctgatcctggaatagctgttggctgttggaggtggagggaggcgccgggagagggcttgggcaggatgatagcctgaatctggaatgagggggaggcgtctagggggccagcagatgcacaggtcttggggtttggggtctggagttctggagggaggtctgggcgtctgcacagacacagaaaccacagtcctggatgggggacggagggaggggaacatggtgtctgagaagctggatttcagagcaaaatgcaggacgctttgggctaagcagccccaggcaggtcctctgagaccctggcgagaggggcttccagggccggccagggcaggggccattcttctgtccagaggcggggctgtgagggatgtcagagaaatcgggagggaggaagaggggctgcgggaatttgtaagctgggagtgcagggcccagggtctgttcccacgccccatccccaccggccaccgagggtgagttagggggcttgaggagaagggaaaacgtttgaacaagctgtagggttatgaggctgggcccggggttggggcaagggaggatgaagagaaagaagagcctgtggttcggcagcttctgatcacagcagctctaacttacggtgctctgggctgcaaggaaggtcttcccctggaccctccaggtgggtgggtgagaggaagaggaggaggaggagccaggcaccagcccttggtgagctgggcaagcagcatcagctcatttcacaggcaggttccaaaagaagtcatgtgcccatggtcacacagattaattattattattattattatttagagatggagtctcactctgtcgcccaggctggagtgcagtggtgcgatctcagatctcagcctcctgggttcaagcaattctcctgcttcagcctcctgaatagttgggactataggcatccgccaccacacccagctaatttttgtatttttagtggagacggggtttcaccatgttggccaggctggtctggaactcctgacctcaagtgatctgcccgccttggcctcccaaagtgctaggattacaggcgtgagccaccgcacctggctggctttttctcttttcttcttctttttttttgagacaggttctcactgtcgcccaggctgagagcaggggcacaatcctcccacctcggcctcccaagcagctgggaccaagttgcccatcactacacctctagtttttgtattttttgtagagatggggcctcactatgttgcccaggctggcctcaaactcctgaactcaagcagtcctcccacctcagcctcccaaagcgctgggatgacaggcatgagccactgtgcgcagctggctttggccttttatctgagctggaggaaacttctggaaagggggcagtgaagagagagccccgggcggaggtgactgctccagtcgaggcagtggcagaaggggtgagcagtgagtgattgtgagcgccgtttgacagcagagcccactggcatttcttatggtcttggacctggaggtgttgtcaggggaaagggaagaggtgcaatgaccccagtgttggcctgagccactggtagaggagtgtggagaggggaccctgtgctcctggcctccctcccgtggcctccggcatgggtcgaccttggccgagcgtgaggctggtgccacctcagcctcccagaccctgagtagggttaacacctccagacccgaaatggcctccggttgaccgggcccactccccatcagcctgtccagccagccagcacttactgagtgccttctgtgtactaagccctgctctgggtacttccatgagtcaactcacgccctcccggcctcagggtgatccaccgccttcccctacagtattccaaggggccattggacctcagaggcttcatgtcctgcacattctccgtgtcatagagcaggaaaaaataaaaacgggagatcgaattctacttcagttgctcctcaatttgtttcttttttcttcttttttttttttttgacatgcaatctcactctgttacccaggctggagtgcagtagcacgatcctggctcactgcaacctctgcctcccaggttcaagtgattctcctgcctcagcctcccgagtagctgggattataggcacatgccaccgtgcctggctaatttttgtattttttttttagtagagacggggtttcactatgttggccaggctggtctcgaactcctggtctcaagtgatcggctcaattcagcctcccaaagtgctgggattacaggcatgagccaccacatctgcttgctcccaattttctttctttctttttaaatttatttagttggggtctcgctctgtcacagtggcgtgatctcagatcattgcaacctccacctcccaggttcaagcacttctcctgcctcagcctcctgagtagctaggattacgggtgtgcaccaccacgcccagcgaatttttgtgtttttgttttttttttttttttgagatggagtctcgctctgtcgcccaggctggagtgcagtggcgcaatctcggctcactgcaagctccacctcccgggttcacgccattctcctgcctcagcctccccagcagctgggactacaggcacacgccgccacgcccggctaattttttgtatttttagtagagacggagtttcaccgtgttagccaggatggtctcgatctcctgaccttgtgatccgcctgccttggcctcccaaagtgctgggattacaggcgtgagccaccgtgcccggctgaatttttgtatttttaatagagacggggttttgccatgttggccaggctggtcttgaactcctgacctcagatgattcgcctgccttgacttcccaaagtgctggaattacaggcatgggccaccacacccggccaaagatctgatgtcccaactttcaaaggtggtctcaggcatcagactctggaattcccagctcccatgtgccacacccagagaccagacccagccaggcctccaagaaggggacaaatgtgggaggccatcactgccccattttattgatgcaggctggacaggaggactcaccacctgagctggggatactcaggtcctggggtgctgaggagatggggctgcatctggagagggtgctgttggggtgtactctcatctggagagggtgctgttggggtgtactctcatctggagagggtgctgttggggtgtactctcatctggagagggtgctgttgggggcactcccatctggagagggtgctgttggggtgtactcctgggaaggcaggggccatagaggagcgggagatgtgtcagctgcctccgtttgggtggcagaaaatgtcacagggacctttcagccacaaagaggcttttaggccgtggttgggggtcttcagggtcttgctctgggcctggctgtatccatgctcaagagtggagaggggcagagggggtgggcaggcggccgtcagggtctggtcttgaatcaggtcccatggactccgcggaaccttcgctggctggcggcgtgcatgtggccagccggtcgcacacccaggcgcccagcttacggtcgcagaaggcgtcgttccagcgaccggagccccgcatcatcacgcagtcctcgccctggctccggctggtgggctcccctggagcccagttgctggagcaaaaggctttgggtcaggggatggggcggggagaaggagcccagttcccggcagccctctgagtctgcaccctcccttctcaccccaggttccccatcctgagtctgtgcctggggaccggtacctcattttggtgccccataccctgcagcccaagactcacccttatttatttgtttgtttgtttatttatttattttgttgagacagaatcactctgtcgcccaggctggagtgcagtgcgcgatctcagctcactgcaacctccgcctcctgggttcaagtgattctcccacctcagcctctcaaatagctgggattacaggcgcccgccatcatgactggctaatttctgtatttttagtagagaggggtttcgccatgttgaccaggatggtcttaaactcctggcaggtgatccacccacctcggcctcctacagcgctgggatgacaggcacgagccaccctgcccggccaagactcacccttctaatctgtgcatggaacttcctccctgagccccttcctctatatcccctcctccaggtcagagaagccttggccaggtcccccagcccccactggcgtccttctcccctgcaccctagagacccttatctctgagccctcatccgctttccgatgcagtttatctagggagctcctccctccacggtatttccatctcctcccctggatcccagaggccccctcctcacctgtagtccacgtggctcccatccacccagataaactcccccttcaggtccaagttccgaaggccaatccaggagccggtgtggctggcatgcttggtcaggaagtcctgggggacaggacagggctggaggactggagacatgtgcccggggccttccagcccacttcgagaggttgggtagagtggggtgggggtccccccaccctcgccatgctgcccaccacctctgcagagccccagcccacctgctcctccgggctgtggatgctgaccagctgcccttccatgtcgtcacaggcataccgggcgtggacccactgcttggtgcccttgccgaagtagtagcacttccgttggaaattgatccacttttcagggcacgtgttgcacacaaagcctggggtggaggagaggctcgggggtggggccaatggaagtgccttgggcaccctgggcagactaggtggcagcacccctcctagggccactcctggggtcccggctaaaagcagacccaccccagggcctaacagacagcctcacgggctgtgttctctgctggagctatgatgctgaccagatccatagtagaagcacctcagccaccatggccacaaacaccttcatggttagcagagcacggtgtcgaccatcaacacctcaactaccatcagcatctccacaaacacctcatggccagaagcaccacaagcaccaacactgccaccacacattcatgtccaatatggtcaacaccatgaccacaaacacactcatgtccaacaacacttcaaccaccatcaccacagacacctcacggctagaggtccctcaaccaccagcaccatgaccacaaatgcattcacgtccaacaacgcttcaaccaccattatcaccacagacacctcacagctagaggcccctcaaccatcaacaccatgaccacaaacacactcatgtccaataatatttcaaccatcgtcataaccacagacaccccacaggtagaagcccctcaaccgtcaacaccatgaccagaaatgcattcatgtccaacaacacttcaaccaccagcatcatcgctacaagcaccaccatggccagaagcacttcagttgtcattataatcaccttaaatccaccacggcttgggaactcttcagtcaccaaagccatgaccacatcaccggctccacagccagcagcacctcagccacaaatcccatcatcacaaatgcttcacagcgagcagagcatcaatcaccaacaccatcgccatcgacagctcatagaagtgcctcaatagccaccaacatcaccataaatccatccatggctagcaacacttcaatcaccaacattatcacccacatcaccagttccacagccagcagcacctcagccacaagcaccatcaccaacagcactttcaccaccctcatcacctcaaacacctcatgccagcagcacttcaaccaccaacaccagcaccacaaatacctcatggccaaaaatgccaccaacaccatcatcacaaatgccttacaggcagctgaatatcagtcaccaacatcatctccacaaacaactcctcaaccaccattacatcatcataaatacacccatggccagcaacacctcagtcaccaacaccatgactacattgccagttccacagccagcaacactgcaactgcaaacactgtcaccacaaacacctcccaactagaagcacctcaaccaccagcactatcaccacaaatacattcatgtccaacaacacatcaactaccaacaccattgtcacacattcacattcacgtccatcaacacatcaaccaccaacaccatcagcacgaatacattcacgtccaacaacacatcaactaccaacaccatcaccacgagcacattcatgtccaacaacacatcaactaccaacaccattgtcatgaacacattcacgtccatcaacacatcaaccaccaacaccatcagcacgaatacattcacgtccaacaacacatcaactaccaacaccatcaccacgagcacattcatgtccaacaacaaatcaactaccaacaccactgtcatgaacacattcacgtccatcaacacatcaaccaccaacaccatcagcacgaatacattcacgtccaacaacacatcaactaccaacaccatcaccacgagcacattcatgcccaacaacacatcaaccaccaacacctttgccacaaacacattcatgtctaacaacacatcaattaccaacaccagcgccacgaacacattcacgtccatcaacacatcaaccaccaacaccatcagcacgagcacattcacatccaataacacatcaactaccaacaccagcaccatgaacacattcatgcccaacaacacgtaaacccctaacactgtcaccacaaacaccttacagccagcagaacgccagtcactaacaccatcgccatcagcacttcgtggttagcaacacctcagctgacgccaatgtcaccacaaacacctcatggccagaagcagctcaaccaccaacaccgttattataaatacattcttgaccatcaatgcttcaactgctgacaccattaccataaatacatccatggccagcaatacttcaatcaccaacaccatgaccagcagcacgtcagcggccatcactgtcaccacaaacaccttcatatccaataacacttcaaccaccatcatcaccacaaacacctcatagccaacagtgcctcagccaccaaccccatcatgacaaacacctcatggccagcagcacttcaaccaccaacaaacccctccaaggtcagcaacaccttcatcaccgacatcattaacagaggtacccaccaccagcagcagcttatctccaccacccacaccacagccaacaccatctttaccaaccacaccagccgtgtcttcatcactggcaccgacagcaaaaccagtgctgtggccaggtccaccagcgattactttccccaagcaccatccctaccaacagccctggtcatcatcactggcagaacccgccaaaccagcactcctagccaatgtctgggaaattgtgatgattttcttccagtgggaggctttggtcaggagagccaatgggattgcaagactaggtcccacaatccctcaatatggtctctttctccccttccccccaccgcagtgaaactcccagacattgttgctatcgcctcccaggtggaaggttaaacccactcttactggatcaaatctttcttgcttcaaaatagattttcagcagtggtgtgcacctgtaatcccagctacttgggaggctgaggcaggaggatcgcttgagcccaggagtttgagaccagcctgggcaacatagcaaaaacccgctttaagtaagtaggttttcctatagtgatatgcagggaaggttccactacacgtggtcagatgttttttgttttgttttgttttgttttgagacagagtcttgctctgtctcccaggccagagtacagtggcgctatctcggctcactgcaacctgcacctcccgggttcaagcaattctcctgccttagcctcccaagtagctgggattacaggcgtgcaccaccatgcccagctaatttttatatttttagtagagacggggtttcaccatgttggtcaggctggtctcgatctcctgacctcatgtgatccacctgcctcggcctcccaaagtgctgggattacaggcatgagccaccatgcccagccacagatttttttttttttttttttaaagaggcagggtctcatcatcttgcccaggccagtctcgaactcctgggctcaagtgatcctcctgcctcggcctcccaaaatgctgggattacaggcgtgagccaccacgcccaccctcacatggtcagatttttctaaggagcttagggtctgcagtagcttgagatgagtgtgcttctcacccatgaaatggtaaccagtactcagccctctggaggtgcagcgttaaaacaggaagaggtggccaggtgcagtggctcatacttgtaatcctagcgatttgggaggccaagatgagaggatcacttgaccccaggagtttgaggccgtagtgagccatgattgtgccactgcactccagccttggtgacagaaccaggccctgtctctgaacaacaaaaacaacaacgacaaaaacccaaaccccaaaaccaggaagaggacatttctgagccctcaaagaaaacttcaggggaaggtgtcttggttgtttgttacatagtcacccagagacaacctcagagccaggctcagatcccaggctgtggggctggatttcggggagacttcagggactggggaagaattaggaggtgacctgtcagaagttgtcatggtccagagtgctcttcccctgtgcctctccctgagggaccacactgaggtttctggctgggattcccaaagccacttcacatcccaggggatgggactccatcacaccaagcacagaaacttcctcttctctgccccagttagggcagctggggcttcccagaggtcaaagaccaaaaatcaagggtgggggcattagctggcggaacggcagggctgtaaaaccccagttcctaccgtacagtaattttttttttcttcagaggcaaggtcccactctgttgcccaggctggagtgcagtggctcaatcctagctcaccgcagcctcaaactcctgggctcaggtgatcctcccacctcagcctccggagtagatgagactacaggtacacatcaccacatctggctaattttttcatgtttttgttgaggcaggatcttgctgtgttgcctaggctggtctcaaactcctggactcaagtgatcctcctgcctcggcctcccaaagtgctgggactataggcgtgagccagtgcacctggtccctaccccacattaagggtacagtgactgaatgtctgctctctctgcagcctgctagcctcctgaggtcaacactgcctccattactgccacccctgggaaagaggccaccatctccattgtcccatcactgcagacattacccccgtctggctccctgccctggtcagacaatctaccaggaaggctatgtgtatgagaatcctactaataactcctcactgggccacatcaggcagaggacaccagcaaggagaacccagcgagggtcaacactggactgctttaacgcagaagaggaaaaaaattgtaggagtctccaaatctgtgaaaggacacagttggaatcagaaagaaattgccaggcaagatggctcatgcctgtaatctcagcattttgggaggccgaggcgagaggattgctggagcccaggagttcaggaccagcctgggcaacatagcgagatcctgtcgctacaaaaaataaaaaaattagctagggccaggtgcaatgacttatgcctgtaatcccagcactttgggagactgaggcggaatgatcgctggagtccaggagttcaagaccaacctgggtaacaaagtgagacactgtggctacaggaaaataaaaaattagcctggcgtggtggcacacactcgtagtctcagctactctggaagctgaggtgggaggatctcttgagcccaggagttggaggctgcagtaagctatgattgcaccactgcatttcagcctgggcaaaagagtaagactccatctctctcttttttttttttttttttttttttgagacagagtctcgctctgttgccctggaatgcagtggtgcgaagacagcatgatctcggctcactgcaacctctgcctcccgggttcaagtgattcttgtgcctcagcctcccaagtagctaggattacgtatgcccgccaccacacccggttaattttttaaaatttttattgagatggagtctcgctctgtcgccaggctggagtgcagtggcgtgatcttggctcactgcaacctccacctcccgggttcaagcaattgtcctgtctcagcctcccgagtagctgggactacaggcacgcaccactacacccagctaatttttgtagttttagtagagatgggggtttcatcatgttggtcagactggtctcgaactcctgacctcacataatctatccgcctcgacctccctaagtgctgggattacaagcgtgagccaccgcgtccagctaatttttgtatttttagtggagacggggtttcaccatgttggtcaggctggtctcgaactcctgacctcaggtgatccacccgcctcggcctctcaaagtgctgggattacaggtgtgagccaccgcgcctggccaagaccccttctcttaaaaaataaaataagcggtgttttatgtatgctctgtgtgtcctgccccatcagaaacttagtcctatttccgtcatcacgcacacctctgcctcgcatccaagcacactccccaccctgcgcttatatctttgtgtcctcccgatgacactcgggtcacacaaacgtatagacatgctgcctcacgtcacacgtgcgtgccgtcacatttgccaacacgcccgagccccaggtgaggtcacgcgtcgtcctgagcagagactcacacactcaccgctggacacctgcaactccatccttagctttgtcacctcctcccggagtctttccagcaaatctgaagcttcgttcctctcgttcaattcttggggagtcaacaaggggcggtgctcagagaccaactggcaggccccctccttgtccgttccctcccccactgccccatcccctcccaagcctcaccctgggacttgaagctgctcagatctgcttgaagcccgttcaggttccaggacagctccaagtctggtgtgtgcaggagcgcagggctggtctcagggaggatgtgtacaggccgagggtgccccccaagcctggccccccagcctcgtggttccccagggctctgagacactccctccttcccacccaatctggcttcataaccccgatcccagtctctcaccctgagatttcaatctctgctgttcagctcgaagttcctccagttcctgtgaaatctgcgtggctgtttgcaggggagggggcttcatggtaagcaggtcctcattgtctcccccatctacccccacccatcccttggtctctttgcctgggttcttggaaccacctgctcagtttgcagttcccgggtgtcgggggtggggcacagtgagtcttaatgctctgggtccaggaagtcatccaagaccccctcgctttttcccctgcaaccccaactccaggagtcactcacactgggatttctgcgccatctggtcaccgtggtggctttccaagttcttggaaacttgagagactggagcggcgggagagaagagatatcccaggaacctcaaaggcaggtccttggaccccgcctatgccccaggctcagggaccctctcacatagtcacaacagctgctgttgctgtttgttcatttactggagcaggaggagtgtactcaggaaggtatatgcaagaatataatgaactactgtgtacctctccctcacccagggttaactataaaagcagtaggcgactatcagggtacttcacaaatcttagagcttgtttctgtctcacggcactaaaagtatgcccattttacagatgaggaaatggaggcacaaagcagttacaaaatccttacactacagatgcttaaggctgccaacttacaatggctcaacttacaatagctcgagttacaatggctcgactttacaatggtctgaaaccaatatgcgtttagtggaaaccttaactctcttgcaatgctgggcagtggtagggagccaaagccttcagccagccacacagttttgacttaaactattttcaacgtactttgcgcttatggggacataaccccattgcaagcggaagagcatctgtattaggatgctatcaggcacttttccaagcttccctgggtccccgccttccctaggacagggagcaacttagtttgaccttcagttccttagcgaggggacactgaggcccagagaggagcgggatgagtgctgggcatcctaaccctcacccccaccccctccaccttgaccccttcataccgttccgggcagccctctcttccagctgttttagactctgtgtggtgtcccagtctggggagggggagagaagaggagtggagaggggggattgtcagtgcccccacctgcctgcaccccacctcccagctggggatggaggtcttgggtataagccatggaggtgctgaaagtgtggaggacagggatgctgggtgtggggtgaggggctctggagggtgggggatgggaaagggctggcagtggcaagatgggaggcaggatgggaaaattgggttttgagaggatgcgttgggctcccccagctctgagatgggggtgaaggagggaacacagaagggccccatgagttggggggaccacatggagctgggggtgtcctcacgccacaggagaagcagagtcagcagcccagcccacagagcggcggtcaccagccccagcagcacgatctgagtcccacgcctgcaacaccgcctcctgggaagctcctcgatctctgccgggggtggagggactgactatgggtgcagggtgaagctggatgctggccctgtccgtctctccattacccagagcccccgacagcctgggagcttgtccagagcccacactgaagcaaagggtctcagtggacccccagctccatttgcacagcttccttacctgactcagggctgggtcactgaccacagagacagatctgggactaagagctaagactccctcagccccaacaaccaatgccaggcccccagcttcacttccagaagactaggtcctgctttttccttcccctctgagccccaacgcccacccttacacctctgcacctgtccccaacctggagtcccttccctaaacccaggacactgagtcccagttcttccccaacatcggagccactccccagccactttcccaggtgtcatccaacatccagacctccaaacctctcccagaccccacccaaaggtctatctggatgtcccacctcaagcccctggccctctgcactcaccctggcttggaggattcattatgctaaattctgcttgttccaagttcctgttctatttggcctctgactctattgggctccccgctccctagctgaagccgtttttttttttttttctttttctttttttgtcaggagggtgttgaatcagaaaaaggaggggccctcaatttgccactccttcctggctctgtgccaggaaagtcagtccggcctcacctccttactcacaccagtccctttcttagaaattcaccctctttcccagagagggactggggagccccgcttctcttctgggtgaaaggcagtagctaagggtcattgcttctgccaacgttagaaccagagagtcctcctacctgaatattgaccttcctccatggcggtcctgcttggattctcccgatgatggagcactcactccctgacaacgcagtccactcagcgggcacaatcacagctctggctgatttgggatttaatgatggttagggtgagccatcaaatcctagttaccagcacaggatagcatctgggacttggtggcactcaggggccatttgctgattttgtttagtctacaatctggactcactagcgtggttagcagggagacacagctggtgtggagagatagcagcctgagatcagaagtggggcactccagagcccatcacacttgagctacacagcaggtgcacccatgagatcttgacaaatggcttaattaacctggaaacttctttcctcattcgtaaaatgatgataccaagaacacctatactgttggttggtgatctgtgctaaaaatatcaccagcgtttattataattgccttgcctgtgtgacctcagccaaggattcaaccattctcagcctcagttttcccctctgtaaaatgggctgatgacagcacccaactcatgaggccaagataggatccaatgagatcacagcatacctgaggtttttggtgccgggctgcgcacagtgggtcttcggattctaaacatttatgaaacatctactctgtgccacgtcccactgagaaatgctaagagcccataacccaggcctcagccttctcctctgccaatgtccccagggcatctgtaaagtgctctgactttatttatttatttatttatttattgaaatggagtctcgctctgttgcccaggctggagtgcaggggcacgatctcggctcactgccacctccacctcctgggttcaagcgattctcccgcctcagcctcccgagtagctgggactataggcacgtgccaccatgaccagataatttttgtatttttagtagagacgggttttcactatgttggccaggctagtctcaaactcctgacctcatgatccgcccgcctcggcctcccaaagtgctgggattacaggcgtgagccactgtgcatggcctatttttttattttttgagatggagtctcgctctgtcacccaggctagagtgcaatggcaccatcttggctcactgcaacctccacctcccgggttcaagcgattctcctgtcttagcctcccaagtagctgggactacaggcacccaccaccacacctggctaatttttgtattttagtagagacagggtttcaccatattgatcaggctggtctcgaactcctgaccacaggtgatctgccctcctcagcctcccaaagtgctaggattacaggcgtgagccactgcgcccgaccaagtcctctgactttaaagcatctactatgtgctgaggagcatgggacttggggtccttcaggcctggaggtcacgggctaccttctttcgctgcttgactataggtaagtcccttctctcggagcctcagggaggtggggtgtggcgcggccaggctctgattagcggcagctcaagctggcccttttgacattgtgagaggaacccagagaccatcctgggactggaactgtccagggaggcagctggacagacctgagtccgagtcctggcttcttcctggatgagcagctcagtttgctcatctgtaaattgggagtattcaaagcaccagcacacagtaggtgctcagtaaacctactggcaggatgctgggggactgtcctcattctgtggggcctctctcagtggaactgaggttccaagagggtaagtcatttgtccccatcacgcagtggtgggactggaactcaaacccgggacccttgagctgggagcccatttgctcaatcatctggagacataatctcatggtggggtgtctactggtaagtgctgggtggcaggatcccaactccaggccgtccttctaacccaagaggtcctgcctctgcctagagtcttccatggctccccagggccctctatgatcggcccagcgcactcaccaagctcatctcagaccagatggcctgctttcacttccccaaatcagggactcgaatgcctcgagattctgtccacactgcggcccccacccccgccccctcaccacccaccacctcccttctctggttgtgacctcctgctggtcatcccttgaggctcagcccaaggtcgtttcttccaagggcgctttgatctccacttcccatggccaacccccaacacaccagatacgtactcacttagtggagtttggagcctgtgtctgtcctcctagtgtgttggggtcgaccagagcgattggcagggaccgtcagagacagaggtttaagcaggaagagagacactttcttctgaaagtagagccactgacagcttctattttcatagacctaaatatgggcttgccacccggataacattacacgcatggcctctcctggtgctccccacacccgggtgaagtccgtgttattattatctccatttctcaggtaagagaattgggtgagaactagagatgttaagcagcaagttcccacagggctgaaggaggtgagtggtagcgtcaagatgtgaaccactgttactgcacactgaatcataccactatggccgatcacagagggccctggggagccacggaaggctctaggcagaggcagggcctcttgggttagaaggacggcctggagttgggatcctgccacccggcacttaccagcagacaccccaccatgagattatgtctcttgatgattgagcaaataggctcccaggtcaaatgtcccaggtttgagtcccagcaagaaaaaagggaagaggagagagaggcagaggaaggggaaaaaaaagacagaaggaaggagagggagaaggaggagtaggagggaaggagggaagcggggggaaagaaagatacgtgagataatattcaggtcaaatatggacagttttggctgggcacggtggctcacgcctgtaatcccagcactttgggaggctgaggtgggaggatcacttaagcctgggagttcaagaccagcctggacaacatagcaagccgttgtctctacaaaaactataaaaactagcagggcatggtggtgcatgcctgtgatcccagctactggggaggcagaggtgagtggatcacttgagcccaggagttcaagatcagcctgggcaacacagtgagatgaaagaaagaaagagagagagaaagagagagagagagaccgggcacagtggctcacgcctgtaatcccagcactttgggaggccgaggcaggtggatcatctgaggtcaggagttcaaggccaacatggtgaaaccctgtatctactgaaaatacaaaaaaaaaaaaaaaaaaaaaaaaattagctgggcatggtggtgggcacctgtaatcctagctactcgggaggctgaggcaggagaatcgcttgaatccgggaggcagaggttgcggtgagccgagatcgcgccattgcattccagcctgggcaacaaaagctaaactctgtctcacaaaaaaaaaaaagaaaagaaaaaagaaagaaaaacagaaaagaaacaccaaactccatcccagccccatcctggaactaagacttcatccccatgtcctcacaacatggcccagctggacttattcccaagcttcctcctccttctcctcgtgtgtccccattggtgggacagtccgtccatccacccagacaccccggcccaggtccaggccttgtccaagcacttcccgatcttccaccccaccgctcacccagcacccgcgcctggctcgtctcaaaaaaataacctgcttctccccatccccacagctgctccctcttccccctggaccaggtgacatccccctcttagggttccccctgcctggtttgccttgtccctgggactgcctcctccatggcctccccactctcatcctgcccccatgacagccttccctggggctctacctcctgtcttgccccccaaaacagaccctccagggtcctcactcccacctggccaccacggcagacccccccttaggatccccaacccgacctgccctcaagactaatcccccagtgaccccaccctggcttggcctcaaatgctgtccctatgtccactcagcagcccccagccacctctccaatgctcagcggccaactctttcccttcctttttgattttttttctttttttgagacagagtcttgctgtgtcatccaggctggagtacagtggcatgatctcagctccccataacctctgcctccccggattcaagtgattctcctgcctcagcctcccaagtacctgggattacaggcacgcgccactacacctggctaattttttgtatttgtagtagagatggggtttcaccaagttgaccaggctggtcttgaactcctggtctcaagtgatccacccacgtcggcttcccgaagtgttgggattacaggcatgagccaccgcacccggaccctccctcacttctttaccatcttggtcctcggccattaccccagatcaaggtggaggggacattttgggacccaaaatgaacagcctcagaccaccagagtcagtcattcactcaacaggcatgcaccaagggtcactcggtccagggtgacagacaaggcagcatggtcccagctgttctggagtgcagggtccaggggacatttcagccaggcccctccctgacacagtgggaacgtccagccctagtggatggcccagcccagccccctcctggttgggaggtgggttgtaggggcacaggggggtgtcttctggagtgagagacatgggaggtagcccacccaggagtggggatttggagttccccagttgagagtggggagggtgttaaggatcaggggacacattttgggaaggatgaggagggtgggcaaagtgccaaggggtcttagtatatagaagtctaggtggcatagtggctagggctgcagatgcctgacccacactacctgtgttcaaattcctggttcttccattgaagtgctgtgtgacctttggcaagtcacctaacctctctgtgcttcacataaggcagcattgatcaccaaagcatctaattcctagggtggtggtgaaaattagatgtgttaatatgcacacaagtcactaagaactgtgtccggctgggcgtggtggctcatacctgtcatcccaacactttgggaggctgaggcgagtagatcacctgaggtcaggagtttgagaccagcctggccaacacagtgaaaccccgtctctaccgaaaagtgcaaaaattagccagaagtggttccaggtgcctgtaatcccagctactcgggaggctgaggcaggagaattgcttgaacctgggaggcggaagttgcagtgagctgagattgcgccattgcactccagcctgggcgatcccaaaaaacaaacaaacaaacaaattcctgtgcccagcaaccattgctactaaattaaactatacaacaaaattgtccatatttttttttagagacagggtctcgctctgtctcccaggctggagtgcagtggtgcgatctcggctcactgcagcctcaacctcctgaggttcaagagatcctcctactttctcctcctgagtagctgggaccacaggcacgcaccaccacgcctggttaattttttaaatttttggtagcgatggggtctcactatgttgcccaggctggtctcaaactcctgggctcaagtgatcctcctgcctcagcctcccaaagtgctgggattacaggcatgagtcactgtgcccagctggaatttggtgtttctgagttctacaagcccaggtgccccagcccaaccccaccggccccatcatgtccttcccaggggtgaaagccccctgcctgctgggttcctgccaagactcagctcaaacactaggatgctttggggccccaaggacccagtcacgggactgccccacccgcttcccctctgcggtattaatacgcctcttgctcacttcgggggaaaaacagaaaattgtgcggatgtgggccccagatctgtgggtgtcggttcttctttcagatttgggatcctctgcatgttgggggaggccgcgtctcgctcctcgtttgacctaggtcagaattcaacaggaaggagtttagggtgtccagcaacaacaaccctcaaccatctccagctgagctctcatcccagccccggccctgaccgtaaccccagctcaactacaacttgatcccctcaccccacgatgctctgatcccagccctaacctctgctctgcacaggacggaggcacgtccgcggctctaatcacagaacccccacacctgggacagggcctggcgctgtgtcccaacgagatggagcctggcgaccctgactctaaccccatcccgacacagccctgggctttcctacctgtttaacctctcctggggttacgaaggggagaaggaaagggtgcaggggtggggaggaagggcagtaggtgtgtcaaatccaggggggcttccaggaggaggtgtgttcaaagctgggtctctcccaccctgcactgttgactttgggactgatgattcctcgctgggatgctgtcctgtgcattgttggatgtttagaagcatctctggccactagtcgccgaaagagtcaccgtggttgagaagcgctgctttgaaaacatgattcctagatcacgctttattttgttttcattgtggcaaaatatacataacataaaatttaccatcgtagccatttctaagtgcaccattcaggagcatgaaacacattcacactgttgtgcaaccattaccaccatccgtctccggaactttctcatcttcccaaactgaaaccgtgtccccatgaaacactcactccctatttacccaactccagcccccatgagagctccccttagggtcctcacccccaccagaccttcatgacagcctcctttagggtctccctgaaacccctcctctgtgtcttccctgaacggcaaccacctgcccatatcttctctctgcctacaaccatccatggctcccttctgccctgggcccaaagctccagcttcccatgtcctggagttcaagggtcctgcctgctcaggcctggcagctggtctctccagccacgcccatacctcttcctccaagactccacagagtgccttaacttcacacagttctgaaacaccaggctgtctccaagccttcgcacgggcagctgctgcctaaagtgctgagccaacccacagcaccaatttgtatggaagcctccctgccacccatagtcctaaggccccctcttttcccagccttgagctcctgcactggatgggcccctcctgggactgggggctccccaggggcaggacctatgccccactcctagaagggccaggagggcggccctgaatcacagtcacatgcacccctttccctccgcttccggacccccactcaggcagagagccagtcaacaggaagaggaaaggggtgtgtgggatgagaagagcctggatgtgcacttttgtcttccgggaacctcgggatctggagcccaaacctaggctgtttttttggtgtggattgtggcagtggggtggggagagcttgggggcactggtatgtgtggctgggagtcctcaggctaagaggggacgcagagatggggttgtccacacccttccctccagagggccccccagaactccaggaggggggtcctggaccactcattgcctccctgccccctcccctcaaggccccaggatacttctagggaccagagagctgagccagcaggtcctgaggcttctgagagcagcccaggcccagcctgggagatttggggatttctttccaagaacgccctcagagactctgaaatcctggactccgggctccaccctcacagacccggggcttcaacttcctggagacccaggaagccaggcccccagaccccaccctcagggactcaggctcagttccctaaggatcaggaagacaggcccccaaaccccatcttcaggaactcaaattcccagcccttcagggacccaggaggttgggactccagcctctcaatccctgagagaccaaagcctccagccccatagggacccaggaagccaggccccaagaccccatcctcagggacccaggcttagcctcttttttttttttttgagatggagtctcactctgtcgcccaggctggagtgcagtggcgcgatctccgctcactgcaacctccacctcccaggttcaggcgactctcctgccttagcctcccgagtagctgggattacagtcacccacgaccacaccgagctaatttttgtatttttagtagagatggggtttcaccaagttggccaggctggtcttgaactcctgacctcaggtgatccgcccacctcgacctcccaaagtgctgggattacaggcgtgagtgaggcttaatatcttaaagacccaggaatccaggcctccagacctcatcctcagggacccaggcccccagaccccctagggactttggtgtgggatcgtgtgtttttctcctccgtccctgctgatctcatgccggtttctgggtctgccaggacagtggcgggtgctgctgctttgctggacacacctggtcactgccaccactgtgtaacccctgatgtgggtaactaaaggccatgggttcccagcccagctgcacccctttacctgctgtgtgacttaatcctctctgggccccagtttcctcatctgtaaaatggggataacctcgtctgtaaaatctctcacataggttgctgtgtgcgtaaagccttcagcccaatgccagatatagggaggctctaaaaatgggagcatttttagtgcaatttcctgaaaaatatctctcacataattaagcagctcccaatccggcagccagcaaggccctgtgtggctgacaccttctcctctgtattgccccctctgtatgcccctccagtgacaatggcctgcctttctgttttatttttggagagatggtctcactctgttgcccaggctggagtgcagtgcagtggtatgatcacggctcactgcatccttgacctcctgggctcaggcgatcctcccacctcagcctcctgagtagcttggaccacaggcacatgccacctgcctagctaattttaaaattattttgtaggccgggtgtggtggttcacgcctgtaatcccagcacttttggaggccgaggtgggcgggtcacgaggtcaggagatcgagaccatcccagccaacatggtgaaaccccatctccactaaaaatacaaaaattagctgggcatggtgacatatgcctgtaatcccagctactcgggaggctgaggcaggagaatcacttgaacccaggaggcagaggttgcagtgagccgagatcgtgccactgcactccagcctggcaacagagcaagatctccacctcaaaaaaaaaaaaaattgttttcttgtagagacgagggtctcgctatgttgcccaggctggtccccagctaccggccttaagcaatcctcctgcctcggcttcccaaagcgttgggattacaggcatgagcccacatgtcctgctcttccttcatcttcacagccagaagcacagcctcttccaatctctctctgactctcatcctcctgcctcctcttgtaaggactctgtgatgacattgggccacctggataatccagagtgatctcccatctcaagacccttaacgtaattccatctgcagagccccatttgccatgtaaggtaaactgttcacaggttcccgggattagaatgtggacatctttggggaggtgttactcagctgaccactataccctaggagacagatgttgttattattattattatttgtttttgagaggagtctcgctctattgcccaggctggagtgcagtggcctgatctcggctcactgcagcctccgtgtcccaggttcaagcgattctcatgcctcagccttcacagtagctgggactacaggcatgcaccaccatgcccggctaatttttggtagagacggggtttccctatgttggccaggctggtctcgaactcctggcctcaaataatccacccgcctcagcctcccaaagtactggggttacaggagtgagccaccgtgcccggcccaaactctgggctttttgttggcatctgctacattcatccttttgagctgtgtctgactctggggacacgggaaaggtaagaatcctcatggggtttgggggacaggcctgacgaggagactctgtctgcccccgcttctttggagagcaccctggggacttccccacactccccagccttcctaggaagaagccctcgggatctgagggggtttcctgggatcagggggagaggggtgggaggctgataagaacagactactctgtctgaaagacatgactttggaaagtgggatcaccatggagctgctctatccaggaaaccctagctgggctccaaggtcaccagcaatttgctgaccgagccccagagagagttgccctgtggtcactcagggggctagtggtggggacaccccgtaaaaagaatcagggagtggctggaaggtgcccctctctgcctccatgccctgctttccagcacaaacccccattggtctcttcagggcagagcctactttctctccctgtaccccactccccaggccggaaatgccgtggagggggaattgcttttccagaattgttcatgtcagacctcaccacgtgggcacaccctctatctgtcctcaccacctcttcctctctctgccagactgtgggccccaggagggcagcaaccatgacctgaaccccaacatttcaccatgacaattttcttttccttccttccttcctttctatctctctttccctccctccctccttccctccctgcctcctttctttcttcctttctttcctttttctttcttttcttttcttttttctttcttcctttcctttccttaccttaccttatgttacctttcctttcttttcttttcttttctttcgtcagtctcgctgtgtcgcccaggctggagtgcaatggcatgatctcggctcactgcaacctctgcttctcaggtttaagtaattctcctgcctcagcctcctgagtagctgggattacaggcatgcaccaccacgcccagctaatttttgtattttttcgtagagatgcagttttgccatgttggccaggctggtctcgaactcctgacttcaggtggtccacctgtcttggcctcccaaagtgctgggattacaggcgtgagccaccgcacccagccaaatttttcttttttcttttttttctaattaaaattttttttttttggccaggaatggtggctcacacctgtaatctcagtgctttgggaggccaaggcaggaggatgacttgaggccgggtgttcaagaccagcctaggcaacatagcaagacacccatctctacaaaaaacaaaaacaaaaacaaaatagctaagcatggtggtgtgtgcctgtagttccagctactcggaaggctgaggtaggaggatcacttgagcccaggaggtcaaggctgcagtgagttacaatggcaccactgcattccagcctcgatgacagagtgaaactctatctcagaaaaagttttttaaaaaatatttttatttttaggactaagtttctgtctggtcggacaggacagatggggtacacataagaaggccctttcgtatttttagtagagacggggtttcaccgttttagccgggatggtctcgatctcctgacctcgtgatccgcccgcctcggcctcccaaagtgccttttttttttttttaagatggattttactctgtcacccaggctggagtgcaatggcaccatcatagcccactgcaacctcccaactcctgggctcaagggatcctcccacctcagcctcctgagtaccttgggactataggcatgtgccaccacatccagctaattaaaaaaacttttttgtttttttttgagatggagtctcactctgtcaccaggctggagtgcagtggcacgatctcggctcactgcaacctctgcctcctgggttcaagcaattctcctgcctcagcctcccaagtagctgggactacaggcacacgccaccagacctggctaattttttgtatttttagtagagacagagtttcaccatgttggccggcatggtctcgatctcctgaccttgtgatctgcccgcttcggcctcccaacgtgctagtattacaggtgtgccccgcacctggccttgttgttgtagagacaaatctcgctctgttgcccaggctggtctccaactcttagcttcaagtggtcctcacacctcaggcctcccaaaatcgtgagattacaggcgtgagcagccacgggctaatttttgtatttttaatagagaccgggtttcaccgtgttggccaggctggtttcaaactcttgacctcaggtgatccacccaccttggcctcccaaagtgctgggattacaggcgtgagccactgcacctggctgtaacttttttttttagccaaaattatgtgaacatatttgttaccagaggcaggtggtggtgggcggggtggggcggggactggggagatggtggccaaaggatacaacatttcagtgacaggaggaacaagttcaagagatctattgtacatcatggtgactatagttaataatcacatattgtatactcgaaaattactcagaaagtaggtttttgtttttttgagacggagtctcactctgtcaccgaggctggcgtgaagtggtgcgatcttggctcactgcaacttccccctcctgggttcaagtgattctcctgcctcaggcctcccaagtagctgggattacaggcaccagccactacgcccagctaatttttttgtatttttagtagagaaggggtttcaccatgttggccaggctggtcttgaactcctgaccttgtgactcgccctggcttaaggcaatacatatgttgtgaataagcttgatttggctaggcacggtggctcacacctgtaatcccagcactttgggaggttgaggtgggtggatcacctgtggttaggcgtttgagaccagcctggccaacatggagaaaccctgtctctactaaaaatacaaaaattagcagggtgtggtggtatgcgtctgtaatcccagctactcgggaggctgagacaggacaactgcctgaatccaagagggagaggttgcagtgagccaagatcacctcgctgcactccagcctgggtgacagagcgagattccatcttaaaaaaaaaaaaaagtgataataacaattagaaggaatgactaagatctactatttaatagtacagcagagtgactacagtcaataataatttaattgtacattaaaaaataactaggccaggcgccgtggctcacgcctgtaattccaacacttttggaggccgaggtgggtgggtcacttgagataaggagtttgagaccagcctggccaatatggtgaaaccccatctctatcaaaaacacgaaaattagcccagtgtggtggtgggcgcctgtaatcccagcttctcaggaagctggggagggagaatcgcttgaacctgggagacagaggttgcagtgagctgaaattgcaccactgcactccagcctgggcgacacagcgagaccctgtttcaaacacagacacacacacacacacacacaccaaaaacaaaacaacaacaagaaaaaataaaacaactaaaagagtgtattaaccgagcgtggctgtgcacacctgtattcccagctacctggggggctgaggcaggagaattgcttgaacctgcgaggcggaggttgcagtgagccaagattgcaccactgcactccagcctgggtgacagagtgagactctgtctcaaaaaataaaaataaaacataaaagaatataattggattgtttgtaacgcaaaggataaatgcttgaggggatggagactgcattctacatgatgtgataattacacgttgcatgcctgtgtcaaaacatctcatgtaccccataaatgtaatcacctgtatatacccacaaacatgaaaaacacaaaatacaaagacacatcacactgggagcaagcatttggagacaaaatactatgcactgtatgatctaatttatatgaaacttcacaagacaagtcaaattcatagtgatagcagattggtgatgacctaggtctctgtcagggctggtgctgagattgaagggcaggagggaattctagggctgatggaaatgttctatatcatcaatatcttgatggttgcccagctgtatacctttgttaaaactcactgaattggccaggcgcggtggctcatgcctgtaatcccagcactttgggaggctgaggcgtttggatcttgaggtcaggagttcgagaccagcctggctaacaaagtgaaacctgtctgtactaaaaatacaaaaattagccaggcctggtggcgggtgcctgtagtcccagctacttgggaggctgaggcaggagaatagcttgaacctgggaggcagaggttgcagtgagccgagattgcaccactgcactccagcctgggcaacagagggagtctccgtctcaaaaacaaaaacaaaaccaaaaaaaaaaacctcactgaattgtaaacttgaaatgagtacattaaacaattaaaaaaatttttaaattgaagtaaaataccataacaacaaattgaccattttaactattttaagcatacagctcagtagtgttaagtatattcacattgttgcacaaccaatctctggaattgtttcatcttataaaactgaaaaaaaaaaccaacaaaaactgaaactttaccgattaaacgacgactacccatcgccgcgtgccccagcccctggcaccccccgttcgactttttgtgtctatgagtgagttgactctggggacctcctatgagtggaataatgtggaatcataccatatttgtctttttgtgcctggctggcttatttcacttagcataactgcctgtgtcagaatttccttccttttttttttttttttttttttgagatggagtctcgctctgtcacccaggctggagtacagtggcacagtctctgctcactgcaacctccacctcccgggttcaagcaattcttctgcctcagcctcccaagtagctgggactacaggtgtgcaccaccacacccagctaatttttgtatttttagtagagacggggtttcaccatgttggccaggctggtctcaaactcctgacctcaaatgatccaccagctcagcctcccaaaatgctgggattacaggcgtgagccaccacgtctggcccacaatttccttcctttttagggctgaattatattctatcgtatggatggagcacattccacttatccattgatctgtttatggacacctaggttgcttcaatcttttttttttttaacggagtcttcctctatcacccaggctggagtgcagtgtcgtgatcttggctcactgcaacctccacctcctgggttcaggtgattctcctgcctcagcctcctgagtagctgggattacaggcacgcaccaccacgcccggctaattttgtatttttagtagagacgggatttccccatgttgtccaggccagtctcgaactcctgacctcaagtgatccgcctgcctcggcctcccaaagtgctgggattacaggcgagagccaccacatctgacctgcttcaatcttttgactattgtaaataatactgctatgaacatgagtgtacaaatatttctttgagaccctgctttcagttcttttggccacacacccagaaatggaattcctgggccatatggcaattctatttataatttatttgaggaactgccagaagctttttccacagtggctgtaccattttacattcccaccaatagtgcacaattttgtcacattctcaccagtactttcatgttctgtaatttttttgatggcagccatcctaatgattataataaatgggtgcatcttattgtatataaattacatcatggctgggcatggtggctcacacctgtaatcccaacactttggacaacaaggcaggtagatcacctgaggtcaggagttgagactagccttgctgacatggtgaaaccccatctctactaaaaatgcaaaaattagctgggcgtggcagtgagcccctgtaatcccagctagtcgggagactgaggtggaagaattgcttgaacccgggaggcagaggttgcagtgagccaaggtcgcaccactgcactccagcctaggtgacagagtgagacctcatctcaaaaaaaaaaaaaaagaaagaaaaagaaaagaaaagaatatttatacctgggtcaagtgaaaattagacaaagagagacatatggccaccctagataaggtaagttacctgtgtgtatttttaggcaaggagagagttacagttatatcttaggtggtaacatcttacgggtgttaaaggtttattgcaggtgtttccagtggtttttcttgagttgagttacttccatcaaggtgtacaggtacttacagacctattagggcatgctatgaaatagtcacaagtggttactgttgtgatatgggtgagctccagctaagcttttgtattagtcagctactgctgcagttaacaaattatctcaaatttagtgacttcagacaatgcaaacttattatctcactgttctgaagatcagaagtctgacactgatcccattggacttatattaagatgatggcagggttgcatccttctgggggagaattcatttccttgccttacataacttctagaaatggctgctatggtttgaaagtttgtgtcttttcagaattcatgtgttgaaacctaacctccaagatgacggtattagaaggtggaggctttagggggtgactaggtcatgagggtggggccctcatgcatggaattagtgccctcatcaatcatcagagacttacttgccctttctaccatgtgaagacatggcaagaacatggccatctgtgaaccaggaaaagagccctcacaagacagagtctgccaacatgttggttttggacttcccagcctccagaattgtgagccaaaaatgtgtggttgtttagaagcaactcagtttatggtgttttgttatagcagcctgaacagactgaaacagccactgatgtccttggctcttggtccttttctcctttttttttttttttttttttgagatggagttttgctcttgttgcccaggctggattgcaatggcgtgatctcggctcaccacaacctccacctcctgggttcaagcaattctcctgcctcagcctcccaagtagctgggattacaggcatgtgccagcatgcctggttaattttgtacttttagtagagacggggtttttccatgtttgtcaggctggtctcaaactcctgacctcaggtgatctacccgccttggcctcccaaagtgctgggattacaggtgtgagccaccgtgcctgtccccccctttttttttttttttttttgagacaggatctcagtgggttgcccaggctagaatgcagtggtgcaatcatagctcactgcagcctccagctcctaggctcaagtgatcctcccacctcagcctcctgagtagctgggaccacagtcatgtgccacgatgtccagctaagttttcaaattgtttttgtgaagattaggtctccctatattgcccaggctagtcttgaactcatgggtcctagagatcctcccaccttggcgtccccaagttctaggattgcagtggcataatcttggctcactgcaacttctgcctcccagattcaagccattctcctgcctcagcctcccaagtagatgggattacaagcatgcaccaccacgcccagctaactttttgtatttttagtagagacagggttttgccatgttggccagtctgatctcaaactcctgacctcaggtgatctgcccacttcagcctcccaaagtgcgaggattacaggcatgagccactgcacctggcccccttcctccatctttaaagccagcaatggtgagtggagccctcacatcacagcactctgccccttctgaaggccttctgcctctctgattttctcctgcctctctcattcacttttaaggacacctgtcattacttcaggcccacctagataacctaaaataaactctcccattttaggagtctttttttttttttaaattttttgagagggagtctggttctgttgcccaggctggagtgcagtggcgctatctcggctcactgcaaccttcacctcccgggttcaagcgattctcctgcctcagcctcccgagtagctgggattacaggcatgtgccaccatgcctggctaatttctgtatttttagtagagacggggtttcaccatgttggccaggctggtctcgaactcctgacctcaagtgatctgcctgccttggcctcccaaagtgctgggattacaggcatgagccacggcgcccagccaggactcttactttaatcacatgtgcaaaatcccttcgtgatacctacctaaggtatgacatattcacagatttggggattggcacagggacatctttggggaaggcatttttttgcctactacagaccttgcacggtgttctatgcaattggtgttgcgccccagggttgttacaggtgtatttcaggtcttacaggggcttctcagagcccctgggaactccaggaaagtggatctgtcttgagaatgctgacggggctcagcctgggtctggcgtcggtcccatcaggctctggggaaatgtcacacggtttgtcaggcacaggccacttcctgcacccccatcagccctttttttttttttttgaaatggggttgtgctctgttacccaggttggagtgcagtggcgtgacctcagctcactgcaacctccacctcccaggttcaagtgatcctcccacctcagccttctgagtagctgagaccacaggcacatgctaccacacccggctaattttttgtatttttgatagggacgggatttcaccatgttgtccaggctggttgaaaactcctgactcaggcaatcaatccacctgtctcagcctcccaaggtgctaggattacaggcgtgagccaccgcacctagcctgttttttgttttattttattttgttttgtttgtttgtttgcttgttttttgaagtagagacaggatcctgttatgtcacccagggtggactgctgcagtgacgtgatcatagctcattgtaaccttgaactcctgggctcaagcctcttgcctcagcctcctgagtagataggactacaggcatgtaccaccatgcccagctcatttaatttaaaattttctttttatagagatgggggtctcactatgttacccaggctgggcttaaactcctagtctcaaatgatcctcgcacttcagcttcccaaagtgctgggattacaggcgtgagccatcacactcagccacctgtcagcctttagaatagtctttctggcaccaccaatattccaggaaaacaaaagccaactgaaggttaaggtctgttccagaaatagggataggctccagggattcctttcttcccagagaagttgaatcttggagtggagggtgtggcctggggcctgggacctgactctctcatttggggtcattatgggccttctggaacactggtgggttacagccaggcgactgggaggtagggcttgtgagctgatcataaatgcagatggcaggtggcgaggagaggacggacatatccaggccagccacttggctctctgggctcctgacctggagctcccttgggccctgctgcccccagaatctgagcctgggggtaccaggggctccagggcatgctctggccatggataggatcccagggcagttccaatttaactctgctgtctggggtctctgccagactggtgtgcggtggtacaatcatagctcactgtagcctggaattcctgggctcaagcaatccttctgcttcagccttccaagtacaggagaatacaggtgtgcaccaccatgcccagccttttatttttattttattttattttattttatgttatgttgagacagagtccctctctgttttccaggctggagtgtagtgacacaatctcggctcactgcaacctctgcctcctgggtgtaagcgattctcctgccttagcctcccgagtagctgagattacaggcacccaccatcatgcccggctaagttttgtatttttagtagagacagggtttcaccatgttggccaggctggtcttgaactcctgacctctggtgatctgcccacttcggcctccctaagtgctgggattacaggcgtgagccactgcgcccagcctattttttaagtagagatgaggtcttggtatgttgccccaggctgatctcaaactcctggactcaagtgaccttcccacctccacctcccaaagtgctgggagtgtttacggaaataccaggggtttggtctaggtcctgctgttcaccgcacagatagccaatcaccgaggcaaggattattgccaagcaagaaggctttaggctttaattggatgctgcaaccaaggagatgggagctcagtctcaaatccatctctctggctgattaaaattaggggtttatatagcaggggagaaatagaacaatatgtggtaaaacaggaacgcgggaggggtcaggaagcaattgtgatgaatgagcagcctggtgtctcatcgtctgcatgtaatgatctgctgagtttcaactctgatgatttttgagagcctggggatcctttcctgagaaggaactcagataaaacaaatttttttggtttgtttatttgagacagagtttcactcttgttgcccaggatggagcacagtggcgcgatcttggctcactgcaacctcctcctccctggttcaagcgattctcctgcctcagcctcctgagtacctgggattacaggcgcccgccaccatgcctggctaatttttcgtatttttagtagagacagggttttgccaagttggccagagtggtctcgaactcctgagctcaagtgattcatccgcctcagcctcctaaagtgctgggattgcaggcgtgagccaccgcgcctggccagataaaactaatgctaaatttcaagctttaagaccacagggtcaggccgggcacggtggctcacacctgtaatcccagcactttgggaggtcgaggtgggtggatcactggaggtcaggagtttgagaccaccttggccaacatggtgaaaccctgtctctactaaaaatacaaaaattagctgggcgtggtggcgcatgcctatagtcccagctactcgggaggctgaggcaggagaatggcgtgaacccaggaggtggagcttgcagtgagccgagattgcgccactgcattccagcctgggcaacagagcgagactccgtctcaaaaaaaaaaaaaagaccacagggtcaatttctatgtttattgaaaagaactgtctatggcaacaatccctaacctttttggcaccagggaccggttttggagaagacaatttttctttttcttttttttttagagacagagtcttgctctgttgcccaggctggagtgcagtgtcgtgatctcggctcaatgcaactgccgcctcccagattcaagccattctcccacctgagcctcccgaatagctgggattacaggtgcacaccaccatgcccagctaattcttgtatttttagtagagacggcgtttcaccatgttggctgggctggtctcaaactcctgacctccggtgatctgcccacctcagcctcccaaagtgctgagattacaggcatgagccactgcacccagcagacaacttttccacagactggggtgggggatggtttcaggatgattcaactgcgtgacatttattgtgcactttatttctataattattacattttaatatgtaatgaaataattatgccactctgcataatgcagaatcagtgggaactctgagcttgttttcccgcaactaagacagtcccatctgggggtgatgggagacagtgagagatcatcagtcattcgattatcctatgacccagatccctcgatgtgcagttcacaataggcttcatgctcctgtgagagtctaataccactgctaatctgacaggaggcagaggtcaggtggtcatgcaagcaaaggagagtggctgtaaacacagatgagctttgcttgctcacctgctgctaacctcctgctgtgtggcctggctcctaacagggcacagatcagtaccggtctgcggcctgggggatgaggacccctgttctatgagactgttgggtgggtttcaggatgacaggtgcacaccactgcactcagcctctcttccttctgcctcagccacagctggcactttctcagctccatcctcaggggagatgctgaaacctcttgtgcctgcccgtgctgttgctgtacatttgtcacgacagcctggcaggggctccccattgaggctgtcggtcagacttgaagtccatctgttgttcttttaaaaaaaaatttttttttagatggagtttcactctgttacccagactggagtgcagtggcgtgatctcagctcactgcaacctccaccttccgggatcaagtgattctcctgcctcagcctcctgagtagctgggattacaggcacccacaaccatgcctggctaatttttttgtatttttaatagagatggggttttgccatgttagccaggctagtctcaaactcctgacctcaggtgatccacccaccacagcctcccaaagtgccgggattacaggtgtgagccaccacacccagccatgaagtccgtctgtcgttctgtctctgttgttcttcattcgatccggagtcgccacctcattgtcagtatgtttgattacaatctgtctgtatcatccagacaatcacttaatctggctcatcaagtagttagacctctaggtaagtatctcactgctgtcccacctgggagtctatctcagatggctctgccctgtgctgtgatgctatgatggttaacacctggtgtcaacttgaccggatggagggagatgcctggatggctggtgaagcattgtttctgggtgtgtctgtgaggatgttatcagaggaggttgatatttgagtccgtgggctgggagaggaagacccatcctcaatgtgagtgggcaccatcccatcggccgccagcgtggctagaacaaagcaggtggaagaaggcgggagaagctggcttgctcgctgagtcagctccctctctcttcccctgctgtgccaatcacttggtttcctctcctcctacccttggacatcaggctctaggttctttggcctttgaactctggcacttgcaccagtggcctcccaggtgttctcgggcctttggctgcagactgaaggttgcactgtctccttccatgatttttgaggcttttggacttggactgagccacactaccactttctgtctttcccgggcttgcagacagcctactatgggacttcgccttataattgtgtgagctaattctcccaaataaactccctttaatattgtgttaggctgttctttttttttttttttcctcaagatggtgtctcattctgtcacccaagctggagtgcaatggtgtgatctcagctcagtgcaacctccacctcccaggttcaagtgattctcctgcctcagcctcccaagtagctgggattacaggcacccgccaccacacctggctaatttttgtatttttagtagaaatggggtttcaacatattggccaggctggtctcgaactcctgacctcaagtgatctgcccgccacggcctcccaaagtgctgggattacaggcgtgagccaccacacccagctgtgttaggccattcttgcattgctataaagagatacctgagactgggtaatttagaagaaaagaggtttaattggctcatgattctacaggctgtccaggaagcatagcagagatatctgcttctggaggggcctcaggaagcttccaatcatggcagaagacaaaggcgaagcaggtgtctcacatggcgaaagcaggagcaagagacagcgtggcaggggaggtatcacacacttttgaacaaccagattttatgtgaactttgagtgagagctcacttatcaccatggggatggtccaagccattcacgaagaatctgcccctatgatgcaaaacacttcccaccagcccccacctccagcactggggatacatttcaacatgagatttgggtggggacaaatatcctaactatatctcacacacacacacacacacacacacacacacgcatatcctatcagttcagtcctggacaaccctggctaacacagatttgtgatgacctgcaatataccatgtcctcatccctggatcctgtgaacatcactttatatggcaaaagacactttgcagacgtgatgatggatttcaagatgggaggagctcgtgtggtaaagaatttgtccctggttcctgctaggaagtgtctaagtccttggaattttccaagtgctgtgagtctttgttattcatcagggccctggaccacacttgggtttatatgagggggtggcttaggatgggtgctggtcatgccagatacatcaaccatgagggttggaatttgcagccacttgaccaaaagggggactggagataaagttcaatcacaaggccaacgattcagtcaatctttcctgtgtaatgagaccccactaaaaactcccgaggccttgtgaggtggctcatgcctgtaatcccagcactttgggaggccaaggcaggaggatcacttgagctcaggagctcaagaccaacctgaacaatatggtgaaaccccgtctctacaaaaaatacaaacattagctggacagggtggtgacatgtgcctgtagttccagctactcgagaggctgagaggtgggaggatcacttgagcccagaaggttgaggctgcagtgagctatgattatgccactgcactccagcctgggcaacagggcaagaccgggtctcaaaaaaaaaaaacaaacaaaactgaaacactgaaggagtaattggatcaatcctgcctacatactgaaaccccaaaaaaactcaggacaccgagctctggagcttcctggctggtgaacccatcaccctgagagtggggaaggcatagagagagtgatgtgtgctgacgttatggggaaggacacaggagctccgtgtttgggaccttcccagacctcaccctatgtatcttctcatttggcaggtcctgatttgtattttgttaagaaaactgaaatcagggccaggcacagtggctcatgcctgtaatcccagcactttgggaggccaaggcgggtggatcaccagatcaaaagagtgagactatcctggctaacatggtgaaaccccatctctactaaaaatataaaaattagccaggcatggtggtggcgggcgcctgtagtcccagctacttgggaggctgaggcaggagaattgcttgaacccgggaggcagaggttgcagtgagctgaggtcgcaccgctgcactccagcctgggcgaaagagcgagacactgtctcaaaaaacaaacaaaaaaacaaaacaaaacaaagaacaaaacaaaacaaaaaacaaactgaaatcgtaagcatagcatttcctaagttctgggagtcattctagtgaattatggaacctgaaggggtcatgagaatttgtaggcagttgatcagaaatgtgggtggctggggatccccaaacttgtagctggtatctgaaatgagagcagtcttgatggggactgtgtccttaacctctgggtggagtctgcactatctgggtgaatagtggcagaactgcatttagaattacaggaggccaggagcagtggctcatgcctgtaatcccagtgctttgggaggccaaggtaggcgaatcacttgagctcaggagtttgagaccagcctgggcagcataatgagaccgcttctctacaaaaaaataaaaaaaattagccaggcatggtggcacacgcctgtagtcccagctactcaggaggttgaggcaggaggattgtttgagcctggaggattgcttgaacttgaacctgggaagtcaaggctgccgtgagccatgttcatgctaccgcactccagcccaggtgacaaagcgagatcctgcctcaaaaagaaaattaaaaaaaaaaaaaaaaaaaggaaccacaggagatcatcctgtactatcaggtcaggccctaaatgcaatcccaactgttcatataagaaggaggcaagaccagcctgggcagcatagtgacaccccatctctacaaaaaaactaacaaatagctgggtgtggtggtgcatgcctgtagtcccagctacttgggaggctgaggcaggaggatttcttgagcccaggaggttgaggctgcagtgaactatgatcgtgctattacactccagcctgggtgacagagcaagaccctgtctcaaaaaaaggtgattgtgggggcattcctagagagatttgatacagaagaagtaattgtcatggctgaagctagatgctaccctactgcctttgaagatggaagaagggtccaggagtcaagaaggatgaggacaacagctctagaaaagctaaagaagaggtaaagaaacattttccctttgatatggtttggctgtgtccgcctccccaaatctcaccttgaattgtaataatccctgtggatcaagggtggggccaggtggagataattgaatcacgggggcagttttccccatactgttcttgtggtggtgtatgagtctctcaagatctgatggttttattttttaattttttaatttttttttttgagatgaactcttgctctgtcacccaggctagagtgcaatggcatgaccttcggctcactgcaacctctgcctcctgggctcaagcagttctcctgcctcagcctcccgagtagctgggattacaggcgcctgccaccacgaccagctaatttttgtatttttagtagagatggggtttcaccatattggccaggctggtctcttggccaggctggtcccgaactcctgacctcgtgatccatccgccttggcctcccaaagtgctgggattacaagcgtgagccaccatgcccagcctcaagatctgatggttttataaatgagagttcccctgcgcaagttatcttgcctgccaccatgtaagacatgcctttgctcttcctttcctttctgccatgattgtgaggcctccccagccatgtggaactgcgagtccattaaacctcttccctttataacttacccagtatcaggtatgtctttattagcagcatgagaacggattaatacatccttagaccttggtttttgcccagcaaaatccattacagtagtggtgggaaactcaaacactcctccaagccaactgtgtctggaagtccagcagcctggccctcagtccagtaggcaagtcaataggctcctggacttgcccagtgcctgctccagactgcaagtttagaaagatcagaggataggggggttgacaggttacagcagtggaagagttccacctggccagggaatgtgatggtgttccttctatttcctgctcagctgatgctgttatacggtccagcagcctgggggctcccagcagcctgtagttctagactccgttctgcacagaactaaaagctgccaacctgtcactcccctgttgaacctgtctccatgggaaattcttggagagcccctaactctccgagatggaagcaagaaactgggagtgtagggtgaattcagatcaaaagtccctggttgagaaacccaggttctatgtaacatatactgctgtgtgaattcagcaatctgtataccttccaacctcctagtattccttttttttgagatatggtgtcactgcattgcccagaatggagaacagtgactatatcaacaggcaagatcatagctcactgccgtctcaaactcctaggcttaagcaattctcccacctcagcctcccgagtaactgggactacgagcttgcaccaccacacccactctccaagcctttttcttcctggaccttctgcttccaaagtcctaccttcccagcttcatctactcaaaattccattgtcccttggaaaatccaccttctctggaatgtatttcctgactgacccatccaatagtcacagaccctagatgcactgagcagaagggacctgctcgttccatcagggtaccctgtcccccacctgcctcaagggcctgtctcaggatgcccataatctccacgaagacgtgacagtcttctcaaggactgcagtatctcaggatggtccctctccccaaagacaaaggtgacccttccaaatgcttcaggtgtcctctccacacactcatccattacattactggtcattttgttcctgtaccccgctagaccagaatgcagcggtcccaggggaaaggactgcgtctgacccatttctgtgtccccagcaccctctgagccaagccccatgccagggactgaggaagtaatggtgtagagtgggaaactgcccctaccttcaagccctcctggcccagggcaagttacccaccaaaggccaagaggtcactgagagagtccaggggtcactcgtacggattaaactaggacatccggaataaagcacagaagatctcgccagagccaggatcctggattcatttctcaaatatttattgatgcttcctcaggctgcaaaaacagcttccagtttggtggaaaatgcgagaaaaccaaacagctccagtcctcagtcacctaaccttggttagggagagaagtggaggcatatcacggggacgcaggagcagggattttggagctagtggaggttaggttgggtctgcgtgagtggagttaggatgaggtcggcatggaggtcccagagcccaggcactgggctggacagggctatgttgggccaagtgtttctgagactcagcagcggtggatgaggaagaaaaaactctttggcaatcagctccaggagccagggaggtgagcagcccccaggatacgacatgctgcaatgggcgcggctccagggcactgggcggggtcagcagttgtgccttttctcacagatccagccgtccttctcgctgtcacacggtgcgtcgttccacagccccgtgtgcagcatcatgacacagttctcgcgcccccaagcgtcattgggctctccctggttccagtggctacaggggggttgagtgggggtgttgctgggaatctagacagaggatgaactcggggtcccgccttcctcttcaggctctagcctgtttattgcttgggtctactctagacaccccaactgtctaacctgagtatacacctggtatataactttttaacgcccagaatttaacctgaggacagttcctggggtccagcctgcccatccctaagtatggagccccagccgaggggtccctgagatctagccaaagcatgtcctctagagcctaacctgtctccctccccaggtctcaccaggagcctttccctcacctgaagctgagagagactccgtccacccactggtagccctgaaccttgcccagatggcgcacagccctcaggcccagccagtaaccacggccacgcgtgttccgagtgaggaagccctagaaaggaggggacatctgagcctgcagagtccgccccgccctgccccaccgcctgaccacgccccctccccctgcgcacctgctcatccaggcccccaacgatcaccaggtgcgcgctggcatctgcgcagtgatcctgcgccgccgcccacgtcgtctttggcacagagaaaaagtagcaggagccctcgaaggacagccacgacgtggggcacggctcgcaggagtctgcggggtggcgagggtcagagaggtcgcgtgcttccaggggcaacgcaccgagaggatgcagtgggtaggggttcggccccgcgggctcaggggtggagacacagaaccaggccaaggtccaggagtgacagggtccgcttacgccctcacagcccgcccccgaccccccgtctcgctcactgttctggagcctcacggcctccagcgcccggaacagctcagtgcggacgtcctcacggcccctgccggcttcagccaagccctgggtcactgcggggtcaagggagcggggattatggctggggtcagggccaggaccagggtcatgactagctaaaggtcaggacccctgtctgtggtcattgtaccctcggtgccagcgtccaggatggcacagggtcaagggcggttacaactgggcagggtccgggtgtggccggcgctaggagtggcagtcaaggtcagagtgcagcgtcagggtcaggacggggtgcatgatcggggtcgggggtcagcactcaggacggggtcggggtcgggggacgcggccagggctcagggccggggtcgcgtcgggccctcaccgcgctcacgcagttcccgcagggcgctctcctgctccatcagcttcgcctgcgcctccccaagctccgcgcgcgtggtctgcagctgcgcctgcgtccccgagcctgggagccgcagggtgagaggggcgagggcggcgaggatggggcgggacttcggagaccagcccccgccccgcaccacccgccgcaggcctccgccccggcccccctcccatcgcggccgcaagaccccatccctgcgcccacagcctcgaccgcgccccctcacagcagctgtggcagtctccgacctcctccttcagggcacccagcgccgccgtctgcttcgaggctggaacgacccccgccccaaaatgcatgcccctcgggtcacttgggaggactcaggggacccccttccagcctcagggaccatagggcccccacgcactcgagactccatctccggggtctcagaaactcccgcccctcacgccccgggggcccaggcgcccggctctgcacacaccgtttgtcctcagcaggtcgtggccgtcaagcagcgccgcgcgctccgtggaggctgaggagagaggctcctgcaggcgaggccgggaactcgggaatcctcccctcgcccggggggtgcagcgtcccccaactcgggagcacggagcgggcgggcaggcatacagctcacacgatgtgcacacacgccgatgggagacaaacgcgcggggactcgcgcacatacgagcacgccatgtgcacacgcgtgagtgcacacggcccaaagatgtacacacactctgctcacactcagacgcgaacaggaccccaggatgcagctggtgcgccatgcagtgggggttttctgtccccaggggggccggatgcaacacctccccattgagagtcactcacccttggacaataggatactcagaatcacagcccaaaggactgtggtgaccaggacagccagggccaagaagaggggtctcctgctccagtgcacccagcgtccccagggccctggcataacaaggacggcatgctgggtcccccagaactgagccctggaggcctgagttactcccaggaaactgagattcagagaagttaagtaacttgcctatggtcacacagcttctaagcggcagagttggaattggaccctggtccaactggctctatggcctgtggtgtctctcctgcacccacaaccctggcctgtctcgactcttccctcccctcccccatcaaaccccagacactggggcagggatggggcagtctccttgctcatacctccggggacctcctcggagctgccgccccacttgctgtacctggtggtgtccatggcgatgcaggcacccagtcctgggcagagatataaatttcacgcctgttctcactggacctacgcactcccttccttccttcccattttcttggccttaattcctggcaacgggaacccatggaccaatcacaggattgggccctttcaaggctgggctgggctgggctggagtgaggccgggcggttccagcctcctggttctggccactgcagctccatccccaggctggtgctggaggcttctctttggagcttagtcaccatctcttatgggcctggggctggaggcttctctttggagcttagtcaccatctcttatgggcctggggctgggttttatcccgcgagggacacactgaacccgaccaaattgtaacccctgctggctcctgagaaagccccctcaggcatagccccccaggccagttcaggtcccttctcaactcccctgcaggtgcctgcagaggctgggtttgaacctgaccttgatccagtccctctgtaccagaagggaacaaacagttttgttagggaggtagccggcggagctgcaggactctaccactgtatgggttctaggtagcttctagaagccttagttttccccactgtaaaggagatagcgatgggcctctctcacaaagatgctatgataaagaaacaagacagtcttgctggctcacacctgtaatcccagcactttgggaggccgacatggaaggatcactgagcccaggagttccagaccagaccagcctgggcaatataacaagaccctcatttctgaaaaaaaaaaaaaaatatatatatatatatatatatgaaaacaaaaattgaaaaaataaaaaaataaagacaatgaggttatacatgtctacctagcaccatttcaggcatatcaaaaacactcagtgttcatgcattctttcaacaaacattgagcacctgccatatgccaggcattgatcttggaactggggccacatcagagagtaaaataagcaaattcctctcttcttggagctaatattctagaagtgtggggagacagactccatactcaacgtaataaacataattgaaaacataagttgtatagcatagtagttcccagctgggggcaattacgcccaccaggggacatttggctatgtctggagacacttttggttgtcacagaatgtgtgtgtgtgtgtgtgtgtgtgtgtgtgtgtgctccaggcatctagtgggtagaggccagggatgctgcgcaaagccctacaatgcctaagacatcccccatagcaaagaatgatctgactcctaatgtccatagtgcaaaaggtgggaaccgtagtatactctattcaaaagtcataaatgctatgaaaaaacattaagggaagaaaaaatccagtaggataagtacttggcaggactgggatgggcactaggcagtgggcagtggctagggtggccagggccagcctcactgacaaggtgaaatgttgagcacttaatagaatgttccagcccctcttgtagatatgtaaacacacttcatcttcttgagcctctcaaaaacccttatccattttttcatttaaaaattttatttgagccgaggcgcggtggctcagctctgcaatttcaacaccttggggagccaaggcagggggatcgcgagaccagcctgggcaatgtagcaagaccccatctttacaaaattaaaaaaaaattttaaattacctgggcatggtgatgtgtatcggtagtcccagctactcaggaggctgaggctggaggattgcttcagcccaggagtttgaggctgcagtgagctgtaattgtgcccgctgcactccagcctgtgacagagtgagaccctgtctcaacaataaataaataaataaattgtacttattgtctatttccccctttcttcttccaggaatgagagacattcacaataaaatgaaataaaaaaaacaagaggattttgtaaaagaaagatggaagggaaaggaaggtgaagaaaaaaccacacatctaaaaagacaagccttgtacacaaaactcagaccagggtgtcaggcttcataccagcatctcctggttttgttgaggcagggaatagggtcagacacccagcaatgggcaactgactcttccggagtaatattttggggtggggtgggagagggggatgtgtagaattaagtcctcatgaaagtttccataaatgcagtagcaattggctgtcactgagcagagagtagatggcttcctggttcagggagtggaaatgaaaccccacaagaattgcacaatctctgtccaaagcaaccatcgtaatgtgttctggggaaaggatttacatggaagtgtttcatcagcccttatggaggagatagaattagttcatttgggaaatcggaggttttctggaagagatagcatgagacgtgtggctttgacgacatgtgtattgtggacagagaaaggaaggacacaccaggcacagggcacagccaagacaaaggcaagggggcaggaaagtggggctcagctggatacacctgtggctgaagctgccttggcgagccagggcggagctgtccagtttagcgaggaagccagaaggctgcccatccatgtcccgtgcccagacctcgctgtgggataactgagaggggaagagaggtcctagaaggaggcagcagacctccactctctacccctggcctaggacagggaagggaggcctgtttctcggggaggggggcagggaacatgtaaccaggcaatttgaaggcaatatgatgagtctgggaagtataggagactgtgaggaccactggagacactggctgagccgggagggcttcctggaggaggtgatgcctggggaaggagtcagaattattccagaggagatggatacattaaagaatggccccaacatggttatcagcacatgcaaagattgggagagtaagggaacaggacttgttggagaagctgagagtaattcaggggcagtcatctggggctagggtgtcagctggggtcacatcatacaaggacctgaagagcagggacaagaggtttgggcgaatgtgggaagaaggtgaaaatcacaggattcagccccaaggccatgaccactctggtttccattctctgcagagatgagagggttgctgtaaccagggaagccagcccactgcaaagggcatatggtgtactggttgtcgctctgaattttggctttgcttttattttttattataaagtatgcaaagaggtatgcaggaaaaaaaatgaaaacgcttatgccttccactcagctttatcaagttttgatatcttcacatatttcagatattcttaaaaatcatcacgtaacaaataacaaaatgtagcaaataacatcgtataacaaacatgataacataacaaataacatcacataacaaataacataacatcgtcacataacaaatcatagcaaatagagtggaggtctcttgtaccccaccctcctcttattcccctccccaaggccactgctctcccaaacttggtgtttatcctatcttaaaatgctttaattacaaatctttcaatggtgaatatattgggctgttttgcacatctgggagctttattaaaatgtcatcacatggtctatatccttccggaacttgtttttgtcctctccacattacaattatgagatatgtctattcaacattcattctgcatttaaaatgaagataagcacaaaaaataaatgcttagtaaacacagaacaggataaagcttccttaatttgagaagtggcaatttccaggatcttacagaaatgtcttccttaatagtgaaacatgagaaccatttttggtaagatccagaagaaattcaaaatgtccacggtgtaggggattgaacagtgtcccccaaaagcaatgctggggctaactgtggtggcttacacctgtaatcccagcactaggctgaagaagtgcttgaggccaggagttggagaccaacctggacaacacaagaagaccccacctctacagaaaaatttagctgtgtgtggtggcacatgtttgtagtcccagctactcaggaggctgaggcagggcaatctcatgtcactacactccagcctgggcaacagagcaagatccccttttttttttttttgagacagggtctcactcggtttgcccagtggcagaatcacagctcactgcagccttgacctccagagcacaagtgatcctcttgcctgagccttccaggtagctgcaactgcaggggagcaccaccatgcccaactctttctttccttccttccttccttccttccttccttccttcctttttctttctttctttcctccttcctttttctttctttctttctttcttttctttctttttcttccttccttcctttctttttctttatttctctctttctttctttcccttctttctctcttctttctctcttctttccttctttctttctttctctctctctcttctttctttttattcttccttccttccttcctttcttctctctctctctctttcttttttttttttgacagagttttgttcttgttgcccaggctggagtgcaatggtgcaatcttggctcactgcaacctccgcctcctgagttcaagcaattctcctgcctcggcctcccaagtagctggggttacaggcgcatgccaccactcctggctgattttttgaatttagtacagatggggtttcaccatgttggccaggctggtcttgaactcctcatctcaggtgatccccccgcctcgacctcccaaagtgctgggattacagatgtgagccacagcacccagccagtttttctatttttttttttttttttttttttttgtaaagatttgatctcactttgctgcctaggctggtctcgaactcctggcctcaaatagatcctcctacctctgcctcccaatgtgctggaattataggtgtgagctgcctcacccagcccctatctcttaaaagcaaaacaaagcaaaatgagagaagagagacacagagggaagatgacgtgaagaggtaggaagggagaaaatcatgataacagaagcagagattccagcaatgggtgtacaagccaaggaacgccaaaggttgtcggcaaccaccagaatctagagaaacgcagggaaggtttctcccctacgcaattcagagtgaacacagccctgctgacaccttgagttcagacttccggccttcaggactgtgagagaataaatttctgttgttcaaagtccccgctttgtgctactttgtcgtggcagccctagctcactgattctggctggataaggggtaatttctgtgagcctgccgaaacgccttactcaatagtgaaatgtgagaagcatatttagtaaaatcaagaacacgataaagatgcccctcttgctattttgtcgatgcaataaggaaatataaagaattaagacctgtaaatattggaaaggatgagtcaaagctgacaatatttggaagatgcgatcttgtatctaggaagctctagggacttctggactaattaaagaacttggttgggcgcagtggctcacgcctgtaatcccagcactttgggaggctgaggtgggtggatcaagaggtcaggagatcaagaccatcctgactaacatggtgaaaccctgtctctgctaaaaatacaaaaaaaaaaaaaaagtagccgggcgtggtggtgggtgcctgtagtcccagctactcgggaggctgaggcaggagaatggcgtgaacctgggaggcggagcttgcagtgagcggagatcgccccactgcactccagcctgggcgacagagtcagacttcatctcaaaaaaaaaaagggaggacattctgacacatgctacaacatgatgaaccttgaggaaaatatgctaagtgaaataagccagtcataataagacaaaggctgtatgattccattcatgcggggtccctagagtcatcagattcatagaaacagaaagtagaatggtgggtgccaggggctggggaacggggaatggggagtcagtgtttcctggggacagagtttcacttgggaagatgaaaaagtttgcgagatgaatggtggtgatggttacacaacaatgtgaatctactttgtaaaagaaaagaaaatttcataggctgggcacggtgactcacacctgtaatcctagcactttgggaggcgaaggcgggtggatcacctgaagtcaggagttcgagaccagcctagcgaatgtggtgaaaccttgtctctacgaaaaatacaaaaaaattgccgagcatggtggcgggtgcctgtgatcccagctactcaggaggctgaggcaggagaactgcttgaacccaggaggcagaggctgcagggagctgagattgcaccactgcgctccagcctgggtgacagagtgagactctgtctcaaaaaataaaaataaaaataaaaatcctttgggctccacctactccacagatagattttcaaaattctgttgaaggatttccaaacagattttaaaacaaacttgacaagctcattatttggaatataataaagaggttatactctttagttgggaataaatagcaaagctacaagtggggacagtaacctcttgagatgggaaaacggggacggaatgagctttagttttcactgtagagattgatacgttttggttctgtgtgcacacgtgacttattccacaagtaaatgaaaacctttaaagccagagtagactcaaaaatcatccaaaaattgcacaagaatacctgagaacattttgatagagaagagccatgaccaggcaggccacagcggcccaggcctgtaaactcagcactttgggaggctgaggcaggaggatgagttgagcccgggagttcaagaacagcatgggcaacacagtgagaccccatctctacaaaaaattttttaaaagtagctagatatggtgatgcacacgtgtggtcccagctactcaggaggctgaggtgggaggatcactggagcccatgaggtcaaggctgcagtgagccatgattgcaccactgcacttcagcctgggtgacagagcaagaccttgtctcccacataaaaggagccatgcctggtagttatcaaaatataagcttggcttgggtttcccctactaaagagcttgagacaaggatttggatataagtagcttatctgggaggagattccaagaagcatcagcaggggatgggaagaatgaagaggagcaggtagggaaaggaaggaacccaatacaaaggcaccaatgagctgaaaagggcaattgggtccaatccccctgggagcctctgggagacgacatagaacaagcctcacagttcctctgcctgttgaaggtcaactcttaagtaagacggaatttagcttgcaagctgtttatgaaggtgcatctttggggtcaacatcagtagaaaggaagtgatgtttgtggtgtcttatttacaccaaagaaattctctaattctaacactagcttcctggagttagcaccacattccacaaattaaagggctaggtcccaaaagactgaccctgcttcagatgccaggtgcaaagacagtctttgcactgtctacccacacttctgccaggctggcaaaaaattgtggcttcccataagtccatctcaagttcagtaatttcctagaatgatttagagaactcgggaaaacattttgcttatgttgttgccgaactaaattgggtcagttccctggctcacagtggaaaaccaaacactgaagcactggggttttgtagagagaaaaatttattgcaaggcagccaagcaaggacacaggagtctggcccaaatctgtctctccaagttggaggctggggcagattttatatacagagggtagtgaggcatgatatgattggatcttgtaatgaggggattcaggaggcttgatctgactggatcacgccagggctcaatctgattggatcaaggatcatgccacgtggtgtccacttcttaactcagtccctgttcctcggtctgagcacttaggttccacgtggatttgcacgcttcgttcatctggacatgcccagggtatgtaacttgcaacctgggggtccacgacaactgaaaaacaactcgccattttattacacaaagttgaaccagattgggctgaatctgcggttacaatgtttaccagtttattataaaggatacaactagaggggcggggcggtgccggcaagatggctgcgcccgaaaaggtgacatttccagagaaaccaagccacaaaaagtacagggccgccctgaagaaggagaaacgaaagaaacgccagcaggaacttgctccactgagggactcaggactctcacagaaagaggaggacacttttattgaaaaacaacaactagaaaagctatggggaagagagaggcaaagattacatgaggagtggttgctgagagagcagaaggcacaagaagaattcagaataaagaaggaaaaggaagaggtggctagaaaacggcaagaacaagagcgaaagttaaaggaacaatgggaagaacagcagaggaaagagagagaggaggaggaacagaaacgacagaagaaacaaaaaccggaagctgtccagaagatgctggatcaggctgaaaatgagttggaaaatggcgccacatggcaaaacccggaacccccccttggatttcagagtcatggagaaggatggagttaattgtcccttctacagtaaaacaggagcttgcagatttggagatagatgttcacatgatttcccaacatccagtcctacccttcttattaaaagcatgtttacagtgtttggaaaggagcagtgcaggagggatgactatgactccgaagcaagcctggagtacagcgaggaagaaacctaccaacagttcctagatttctgtgaggatgtgctgcccgagttcaagaacgtggggagagactgggcgcggtggctcaggcctgtaatcccagcactttgggaggacgcggcgggcgaatcacgaggtcaagagatcgagaccatcctggtcaacatgttgaaaccccgtctctaccaaaaatacaagaattagctgggcgcagtggtgcacgcccagctaatttttgtacttttagtggagtcccagctactcgggaggctgaggcaggagaatcgcttgaacccgggaggcggaagttgcagtgagcctagatcgcgccactgcactccagcctggcgacagagcaagaccccatctttaaaaaaaaatagtaattaaaaaataacgtggggagagtgattcagttcaaggtcagttgcaacttggaacctcacctgaggggcaagtatatatgttcagtaccagtcggaagaagaatgccaagcagctctttctctgtttaacggacgatggtatgtacgcaggacgacagcttcagtgtgaattctgcccagtggctcggtggaaaatgatgatttgtggtttatttgaaatacaacaatgtccaagaggaaaacactgcaactttcttcaggtgttgagaaatccaatagagacctctgcttgtctcctcctttggcaagagctccaaggggagagagagggtgggccaccacgatgaatactacaggctgcggggaaggagaaccctagtccagaccattcctacaaaagaaatggggaatccgaaaggaaaaggaagaaatctcactagcacatgtcaaagagccaggagaggcacaattcacctagcagaggaagaaatagtgaccgcagcgggggccggtgcagccgcagtgagaacggccggagccgtcacagccggagccaaagctcctctagatcccaaagtcgtggtaggaggagatcaggtagtagagacagaactgttcagagtcccaaatcccaataaacctgttttattcttacaaaaaataataggccaggcgcggtggctcacacctgtaatcccagcaattttgggaggccgaggcgggcagatcatctgaggtcgggagttcaagaccagcctgaccaacacggagaaaccccatctgtactaaaaatacaaaaaattagccgggtctggtggcgcctgcctgtaattccagctactcgtgaggctgaggcaggagaatcacttgaacccgggaggcagaggttgcagtgagccaagatcgcgccatggcactccagcctgagcgacaagagtgaaactccatctcgaaaaatagtaataataataataaaataaagaatacaacttagaaacagccaaatggaagccatgtataagacaaaggaagatgtgggggtggaaggggttgcgtggagcctccatgccctctctgggtgccattggttgactgggggaattaattccctggtgcttccagcctgcaaaatgagctcttgcaaccagtaagtccccgatcaaaggggtgcaggaggtggtaggtggaagttgaacagatggtaggtttgcatgtataagataacgccccaggggacatagcagctacacatggcaacccaaatatcctaatctccaaaaggaagagagagtggattcttggaacacaagtccacccccaaaggcatcccacaccagctcactcataaagctccaaggatgggccagaaaaacaagctctacaccaggggaaattggaggcatgacaagaaggacagaatgggacccagccttctaaaggaggaagaatctgacaaagaacagtcccagagattttgtgaaggtcgaaggatggagagaaggaactgtagcttaaaagggggtgaagttctgctacgcaggaggggggtttggggtggcaggggctggagaaagaaactgttcttcatccctggagcaggaggctgcggactttttgcagatccagaatttggcaagattacatttgtcgtcgttccagccattgccactaaattccgcgcagtcttcctccccaacgttgttgggctctcctctgttccaatactgcttgaagctgcaaagcccatgcggaatgtgagcctctgtccccgccagctacatgagctgtgtttctaccttctgtcatcttgatgccttaacatctgccctgcgtgtgtatgctggacttgaatccctctgcatacctgataatatgcctgactcacgatgccttgagttcctgcctctcttctcacaacctgtccttgggtggactccacctattgagtgtgtgattttcaaatacaagccaaccagtctggagtccacacctccagcgacctgccttactgggctcttgtactccaagccactatcctgtactaatcaccccaaggccaggtgtcagacagcgaggggcagcccctgtgccccagagcccaaaaaatgcttcacacttcccaatcctaagcctgttcacctggccttgacctttcctttccacagaaaccataataaaggctctggcccacagtcccccctccccaccactctgactcataacagaccctggtgcttccccaggtggcccccagctgtgatgtgtcctctctctagggatctgtgtatatgagaagctattcacaatggcaggtgtctcctgagctggtggccttactggacctcagacttcctattaatacattatattttaatacacctccccggtggcaggctcctcctgcagctctgctggtggaattctaggcacctgccatgctgtctggaagtgggtatgaagaccaccttcctcaactcagtaaaacctccagattcttgggtctagggtgtcagggagttggggaggatccccagggaaagttcaaatcagagtttcacaattccagccccagtggatagggtgccccttctgagatctacctgggcaacagaggtgagccgtccacccattgccacgtgccttcctgatttagatctgaaagtcccatccaggtgaagcggttacttctggaagactgcagctgtaggaagttctggagggtacaggaggagtcaggagggagctctgcttcccattttccaggctctgtctccccatctcttggtaggaagttctgcttgtaggctaacctacagccttctggtatactaggtcctgagccccctcgtgtctgagtccctctcacatgtgtatcccacggcacatgtgtcctgacatgcacacatccatgcacagctggcctctcctcacaccctcttgctaatactgcatgtttatccatttcacatgttctgtgcatgtccatgcacatttactcataactgggcttaatgtgttggagccagaggcaaccatttcctaactgctggtcatgcacatctcctttcagctctgcactgagtgacatcacaacgacagcttgaaatcagccaccatgggaatatttacaccagggaaactggcaaacacgacccatcaggacttcttcctccagagagctggttgttaacctcttgcagcatgctgcaggggtttgcttacatttgatgtttttttccggagcattcacacatgttcagatttggtttgtatctgctctaagggtacttgagactccctcattcatatccttctcctcccttctttccaagtggagcaaaacccctcttctgcaaagtcatctctgagcacctcctccccagttggccagaagccatgccctaggccaggacggggacccccaccaggtgtacctgctcctcagcacttttgattacgacgagctgggcccccacttctttgcaggcggtgatggagtcgtgccagttccgctgggagttagacatgaagtaacagtttccttggaagaatgtccattcccagggacaggggtggcacaggcgttctgttgggggaggctggtcagggctgggcttagattaggttgtccatattcctgtacctgcccagccttcaaggtcttgagagtcagagtccttccttgactgtccacgccgggtagaccattcccctccccacttcccgagaccctcccccatccccatgagaacccaggagtcctggccccatctcctccagactaggagaagttggggctttagaactcagaacagaaggcaggagactggcttaactgagtgcctgttgtgtacctggcccactgtgaacactgagggcaatgatcacagttaccctgtgttctcatttcacagatgaggaaacttgctcaggcagggtcagtgactcaagcaaactcacaccacacaacgaccatctcaggcccaagaagccctggttccagatactcacccactgcagccttcagctgggtcagctcctggtagatctcctgctgcttagatttctctggaagctcacccactgcagccttcagccgggtcagctcctggtagatctcctgctgcttagatttctctggaagctcacccactgcagccttcagccgggtcagctcctggtagatctcctgctgcttagatttctctggaagctcacccactgcagccttcagccgagtcagctcctggtagatctcctgcatcttagatttctctggaagctcacccactgcagccttcagccaggtcagctcctggtagatctcctgcagcttagatttctctggaagctcacccactgcagccttcagccgggtcagctcctggtagatctcctgcagcttagatttctctggaagctcacccactgcagccttcagctgggtcagctcctggtagatctcctgcagcttggatttctctgagagctcacccactgcagctttaagctgggtcaggttctggtagatcgcgtcttgcctggattgttcctgacttatggagctggggaccttggacactgggccaagaaaaaaaaggaactgcaattattaaacacctactgtgtgccaagccttgaactgagccccatagggacatcatttgtgagagccaaggtcttggttaatcccctttgaagatgaagaaaactgacacctggagaaggcagcacagaaggccaaggagagccagattcttcctgtcctcctcctcctccctctcctgtcctgccctagagtggggaggggctgtgggagaggcccctacagacccccagggacaacatcttggctctcagtcccacctccctcccagatctggcagccccaggctgtgtccacagccaaaagccaggcgtggggaccccagaccctcagaacctgcccctgaccttggacaaggagcccagccaagagcgtgaaggagaggagttgcagcaccaggggaccatggccaagacaccctgagagaggatacatgcgtcagcctgccagtgtccccaccggagcctggcccagggagagcctggtctaaatccctcagcaccccaggacccaggaaccccagccccagccccctccactccaacacctgggaatccaggccctagctctaacctccccaggacccagggaccccgtccccagcctccccttccccaggtcccaggaaccaggtacctgcttccacctccccaggacccaggaatccaggccccagcctctacattcccaggtccctggaacccaggcccccagctcccacctccccaggacccagggacccaggacccagcctccccttccccaggtcccagtaacccaggtacctgctcccacctccccaagacccaagaatctgggtcccagcccctacatccccaggtcccaggaacccaggcccaagtccccacctccccatgacccaggagtccaggcccaggcccccacctctccaggacccaggagtctaggcccctgaccccacctccccaggacccaggaacccaggcttcaacttctacctccccagaacccaggagtcttggccccagcctccaccttcccaggaaccaggaattcaggccccaaactcaacctcctcaggtcccaggagtccaggcccctagccccacatccccaggacccaagagtccaggccccagcgtccagctcctcaggacccaggagtccaggagtctctcgtctctcctcccaaactgctaagtcctctctacctgctaagctcttgtatcctcgagtctgtcggaatccaaggcctctcagctgttcctcctctgaatggatagacgtgaaatcagagcctgggcaggctgaggccatggctggccatcccttcccccttcccagaatcccagcgtcccaacccagcctcacccaggaggcccagctgctgcagtcttggttccttggagtcactcatgtcaccccactctcccccagtgtccagaactcctgggggccacagcttttatttcccaccctgtgatctttacttcctaaatctagtctcccacagaaagagaaacaggaagttgggtagggatctgtcatccaaaagactagtggaaagcatcagagcatgagatgggccggatctttcaagaatttcagggaggcagtgggggatggtctggggttgacagggagaaggactcatccactcatggatggctgagcagtgggatgcttttaatgaaatctgataaattgtaagagaaagctactgtgttacaccccctccactagggcaagggtaggcaggtagcacccccagttcctggaagcactgtcccctgtgacctcctggctttcctgctttgagctgctgctgtcctcatttttgggaattcctgctgactttgggagttggggcagaatcataattgcttgtttatttaatgcctagggtagtcaggtacttttccaacagctttataaactcattcatttaatgttcctacccttcagtagatcatatgacctccattatacagatgaggaaactgaggaggcactgcaagtttagctaactggcccaaggtcacacagctggtagatggtggggctgagacttgaacccagtctgcctccacagtgcatgctgttaaccaaagagtgaaatagtatcaaagaggaaagaaaagatccatagcagctttatttagaatgatctgaaattggaacaaccccgtgtccaccagcaggtgaatgataaaaaatataatggcatattcaaagattggaatactatacagcaatgaaaaagcaaagtactagtacatttaataacatagataaatctcacaaaacagtaaaaggacccagacagagtgagtacacactgtaagatttgattttgtgtgaattttgagaacaggcagaactaacctttgaaggagactcagaatgggaattatcaggaaggagcaggtggagattgacaacggggtttctgtatgctggaaatgttctatattttgatcatagagatgtgcatttaccacatgtgtgttaaatctcagtttaaagatggaaaatacatacatgtatcataatcaaatagtggttttcgacctgatctttactttgtattcttttttaaaatgttttaattttagaataattttgggtttatagcaaagttgcaaatgtaggaaagagatttcccatatgtaaatccctcacctagggatccctaatgtgaacccagtttctcctaatggtaacatttcacatggtaatgaggtaggaaactggaagaacttgttttctggccacaaccctgcagacccatacagaatctggtccagatgagatgatgtgaagaaaccagcaggaaccagcagatggcaacaaaagcaatccctggctgcctcattgctcgtgggcataagatactccctccagtgccatgactgtttaccgatgccatggcaatgacctagaagttcccacctgtttccatggaaacaacctggacatcttcgcccttttccttaaaacttctaaagaacctgctcctcaatttgcattgacccaccccttaactgacgtataactgaaagtgagttgacatgagtataactacagctgccaagagcttgtatgttgttgactctgggtgcactgcctatgagttagccctgcttcacaaggagcagtatcattacataaaaaatatctgtctaaggccaggtatggtggctcacgcctgtaatcctaacactttgggaggctgaggtgggcggatcacagggtcaggagttcgagaccctcctggctacatggtgaaaccccatctcttttaaaaatacaaaaaaaattagccaggcatggcacgtgtctgtagtcccaactactcagggggctgaggcggaagaattgcttgaacctgggaggcagaggttgcagtgagctgagactgtgacaatgcactccagcttgggcgagagagtgagactccatctcaaaaacaaacaaacaaaaccggtggctcacgcctgtaatcccagcactttgggaggctgaggcgggcagatcacctgaggtcaggagttcgagaccagcctgagcaacatggtaaaaccctgtctctactaaaaatacaaaattagccaggcatggtggctgatgcctgtaatcccagctactcgggaggctgaggcaggagaatcacttgaacctggaaggcagaggttgcagtgagccgagactgcaatactgcactccagcctgggcgacagagtgagactccatgtcaaaaacaaacaaacaaacaaacaaaaggtggctcacgcttgtaatcccagcactttgggaggccaaggcaggcagatcacctgaggttgggagttcaagaccagtctgaccaacatggagaaaccctgtctctactaaaaatacaaaattagccaggcatggtggctgatgcccataatcccagctactcaggaggctgaggcaggagaatcgcttgaacctgggaggcagaggttgcggtgagctaagatcgtgccattgccttccagcctgggcaacaagagtgaaactctgtctcaaaaaaaaaaaaaatctctgtctgacatcactggctcacccttgaattctttccagagcgaagccaagaaccctccccagctaagccccaattttggggttcacctgtcctgcaacatttggtgaccttgaaggaacaaagacagtgagcaagcggcagtgactggtgcagcactgccgatctgccgatggtgatcgccagtgagacagtgagacagtggggatcactgaagaattagtaagacagcagagacagtggcaattggtgattggcagagaggtgaaacagcaagggatggcaagacagcaagacggcaactggtaaggtggcaagaggcgcccgtcggtgataggtcagtgagacagagaggtggtgatcagagagtggtggagtggtggcaaagaaagaaagacagagaggtggtatattagtctgttttcacgctgcttgatgaagacgtacctgaaactgggcaatttgtaagaaaaagaggtgccttttggccgtaactgccatcttccagtaatttgccaaaatgatgaacgcaaaggggaagaggagaggcacccaatatatgttctctaggccttttagaaagcatggagttgttcctttggccacgtatatgcgaatttgtaagaaaggtgatattgtagacatcaagggaatgggtactgttcaaaaaggaatggaccacaagggttaccgtggcaaaactggaagagtctacaatgttacccagcatgctgttggcattgttgtaaacaaacaagggcaagattcatgccgagagaattaatgtgtgcattgagcgcattaagcatgctaagagctgagatagcttcctgaaatgtgtgaaggaaaataatcagaaacagaaagaagccaaagagaaaggtacctgggttcaactgaagcaccagcctgctccacccagagaagcatgctttgtgagaaccaatgggaaggaggctgagctgctggaaactcttccctatgaattcatggcatcagaggtgttaaaaaaataaaagacctctggattgtgaaaaaaaaaaaaaaaagaaaagaaaagaaaagaaagaaagaaagaaaaagaggtttaatgggcggttccacatggctagggaggcctcacaatcaggtggaaggcaaaaggtaagtcttacatggcagcagaccagagcgaatgagacagccaagcaaaaggggtttccccttataaaaccatcgggtctcatgagactgactcactaccacgaaaacagtgtggaggaaactgcacccatgattcaattatctcccactgggttcctcccacaacacgagggaattatgggagctacgattcaaggtgagatttgggtagggacacacccaaacgatatcagatggtgatcagcggtcagcaggatgatgattggtgagacggagaggcagcagttgacgagagacagcaagacagccatcagcactacggtaatcaaagctgcagagctgtaacactaaccaaggactctttgaagaaccatcatcttccctagcaggcaatggagctgagcagatgaacattcggctgtagtgccatgtgatgtgggaccagccactctgaccagcaggccaataggctactggtcccctgtgacagctgagctggcccaagctgggaaacctgggcacctggccttggtggagaagaccttcacccaggccctaagttggagaccagtcagtgccattttggctcctggggacaggtgagtgtcccctctgcccccgcctccacagtattgtgtgagccaggaaataagacttttggctagatagtcaattcaaagtcccctgtagcacatctgaccaactacgttcttttttttttttctttttttgaggcggagtcttgctctgtcgcccaggctggagtgcagtggcgcgatctcggctcactgcaagctccgcctcccgggttcacaccattctcctgcctcagcctccccagtaactaggactacaggcgcctgccaccacgcctggctaattttttgtattttcagtagagacggggtttcaccgtgttagccaggatggtctcgatctcctgacctggtgatccaccggcctcggcctcccaaagtgctgggattacaggcgtgagccactgcgcccagcccaactacattcttattaccccttttcttggtccttcctcctctaatgtcattttatttttccatcagccgtttattttatttcatcttgaaatgtatgttttgtttacagttttagtttttttgtttttgtttatcatatgatattacttatcatggatattacttattacttatcatcagccaagcttgataacttagctgaggtactgtttgtcatgtttctccctatacaacattatgatcaaataaagtttttttgacaaacacatggatggcatcagaaaatctattaataatagcataccatccgggcactgtggctcacatctgtaatcccagcgctttaggaggctgaggtgaatggatcacctaaggtcaggagttcaagaccagcctagctaacatggtgaaaccctatctctactaaaaacacaaaattagccaacacggtggcacatgcctataatcccagctacttgggaggctgaggcaggagaatcgcttaaacccgaaaggcagaggttgcagtgagccgagattgtgccattgcactccaatttgggctacagagtgagactccatctcaaataataataataataataaatcaaataaacaatttaaagtagaaaacctacatatcacagtagatcaaataaaagggttcaataaaactcaacagtgactcatgatttacatttttaagtcttcatcaactaagagtagaaggaaatatccttaacatggttgtggtatccatcaaacccacagcaaacaccatttctactggagaaactttagaagcattcccattgaaatcaagacaaatgaaaagaaaatccacaaacttgcaaaaatatttgcaagacatatataaagaaatcatccagcctgggcagcaccgtgagatcttgtctctacaaataatttaaaaatttagccaagcgtggtggtgcacacctgtagtcccagctacttgggcagctgaggtgggagattgcttaagctcaggaggtcaaggctgcagtgagctatgatagtgccagtgagcttcagcctgggaaacagagcaagacccaatctcaaaagaaaaaagagactcatattcaaagtaagtaaagaactcctaaaacccaacagtaagaaaacaacaaacctagtttaaagatgagcaaaagtacagatcaacaatggaaaaacaacccaattaaaaatgggcaaaggacttgactaaacatttttccaaagaagatatacaagtggccaacgagcacgtgaaaagatgctcgacatcactaatcattcaggaaatgcaaattaaaaccacaatgagataccacctaacacccactaggatgactactacaaaaaataataacgtggccgggcacagtggctcacgtctgtaatcccagcactctgggggccgaggcgggcagatcatgaggtcaggagatcgagaccatcctggctaacacggtgaaaccccgtctctactaaaaatacaaaaaaattagccgggtgtggtggcgggtgcctgtagtcccagctactcgggaggctgaggcaggagaatagtgtgaacccaggaggcagagcttgcagtgagccaagatcatgccactgcactccagcctgggcgacagagtgagattccatctcaaaaacaataataataataataatataataacataacaaataatggcaaagatgtggagaaactggaactcttgtgcattgttggtgggaatgtaaaatggtgcggtcaccacagaaaacagtatggcagttcctaaaaaatagaaataaaaatttcattacatataatccagcaatcccacttctgggtgtatactcaaaacaattgaaagcaaggactgttttctgttttatggtgtaattgtctagttttagtcttggcgtaatgtgggcctggtagaatgagttaggaagaattccttcctcttcaattttttggattagtttgagaatttatgttagttctttgtaagtttggtagaatttagcagtgaagtcatccagccctgggcatttctttgttgggaggcattttactttgattcaatctcattactcattattgttctgtttcaggttttctatttcttcctgtttcaatcttggtaggttgtccaggaatttatccatttcctctaggtcttctaatttggttagcatatagttgttcataatagtctctgatgattttttttctgtgtatttctgtggtttcaatcgtaatctctccttttcagttctgattttgtttatttgggccttatctctttttttcttggttagtctagatagtggtttatcaattttgattatcttttaaaaaaatttccttttgctgatcctctgtttttgtttttgtttttgtttttagtctttatttcatttagttctgttctggtttgtgttatttccttccatctaattttgggtttggtttggttttacattcctagttccttgaggtgtattcctaggttgtttatttgaaatctttctacttttttgatgtaggcattttgtgtgtttttttgtttttaagacggcatctcactatgttgcctaggctggtcttgaactcctgggctcaagcaagcctctcaccttggcctcccaaggtgctgggattactggcatgagccaccgcacccggccctgatgtaggcatttattgctttaaactttccttttagtgttgcttttattgtatcccacagattttggtatgctctgtgtccattttgatttgtttcaagaattttttttatttctttcttaaggtcttcattgacccagtggttgttcaggagcatatggtttaatttccatgtatttgtacagttttcagagttcctcttgttattaatttgtagttttactccattgtggtctgagaagatatttgatataattctgattttgtaaaaaatgtgttgtggcccaacatgtgatctattctggagtatgttccatgtgctgatgagaagaatgtgtgtgctgcagctgttggatgaaatattctgcaaatatctgttaggtccatttgggctaaattgtagtttaaatctgatgtttctttgttgatttttctgtctagattatctgtctcgtgctgagagtggggtgttgaagccccaaactattattgtattgaagtctatctctccctgtagatctaataagatttcctttatatatctggggctttggtgttgggtacacatatatttaaaattgttatatcctcttgctgaatcaatccctttatcattatataatgaccttctttgcctatttttactgtctttgacttaaagtctgttttatctgatatcagtgtagctactcctgctcactttttgtttccatttgttagaatttcttttatcatcctttcacttttagtctatatgtgtttttttttttaagagatggggtctcactctgttgcctaggctggagtgcagtggctattcccagacacaatcagctcattgcaccctcaaaaccctgggctcaagcaatcctcctgcctcagctccttgagtagtttggactatagacacatgctatcatacctggctagctttacaaaaatttttttagagatgcagtcttaccatgtggcccagacaggtctcaaactcctgacctcaagcaatcatccttcttcagcctcctcctgagtatatatacgtgtctttacaggtgaagtgagtttcttatagacagcatatagttgggtctttttaaaaaattcattcagccagtctatatcttttaagtgggaaatttaatccatttacattacaggttattactaatgtctgaggacttattcctttccttttgttaattgtttcctggttggtttgcatatcttttgttcctttctttctctcttattgtttgtcgttgtggtttggttgttttctgtagtggtaacatttgagtcttttctcttcttcatttgtgttttgctctaccaatgagttttatacttttgtgtgttttcatgatggtgatattgccctttcacttccaggtgcgggactttcttaattatttcttgtagggctggtctagtgatgatgaattccttctggttttgcttgtctgggaaagtctttatttctccttcatttttgaagaataactttactgggtatagtatttgatatggtttggctgtgtgcccacccgaatctcatcttgaattgtagttcccatagtccccatgtgtcgtgggagggaccaggtaaagataactgaatcatgggggcagtttccaccatgctgttctcatgatagtgaatgagttctcatgaggtctgatgcttttataaggggcttcctcctttgctcagcattcattctctttctttccaccatgtaaagaaggatgtgtttgcttccccttccaccatgattataagtttcctgaggcctccccagccatactggactgtgagtcaattaaacctcttttctttataaattattcagtcttgggtatgtccttcttagcagcatgagaacagactaatacagtaaattgttactgcagagactggagtgttgctacaaagataccccaaaatgtggaagcaactgtggaactgggtaacaggcagaagttggaactgtttggagggctcagaggaggataagaaaacgtgggaaagtttgaatcttcctagaaacttggagggctcagaagacaggaagatgtggaaaagtttggaaattcccagagacttgttgaatggctttgaccaaaatgctgatagtgatatggacaatgaagtccaggctgacatggtctcagatgaatatggggaactttttgggaactggggtaatggtgactcttgctatgcaaagagactggcagcattttgctgctgccctagagatctgtggaactttgaacttgagaaagataatttatggtatctggtggaagaaacttctaagtggcaaagcatacaagaggaagcagagcattaaagtttgaaacatttgcagcccagtgatgtgacagaaaagaaaactccattttctagggagaaattcaagctggctgaagaaatttgcataagtaatgagctgaatattaatcaccaagacaatgggcaaaatatctctagggcatgttggagaccttcacatcaaaggcctggaggcctaggaggaaaaaatggtttcgtgggctgggcccagggaccccctgttctatgcaaccttgggacgtggtgccttgcatcccagctgcttcagccccagctgtggctaaaaggggccaaggtacagcttaggccattgctttcagagggtgtaaaccccatgccttggtgacttacacatgggctgtgggcctgcgggtgcacagaagtcaagaattgaggtttgggaaacttcacctagatttcagagggtgtattgaaacacctagatgtccatgcagaagtttgctgcaggggcagagccctcatggagaacctctactagggcagtgcagaagggcaatgtggggttggagcccccacacagagtccccactggggcactgactagtggagctgtgagaagagggctactgtcttccagacctcagaatggtaaatccactgacagcttgcaccgtgtgcctggaaaagccacagacacccaatgccaacccatgaaagcagccaggagggggccacaccctgcaaagccacaggggcagagctgcccaaagccatgggagcccacctcttgcatcagcgtgccctggatgtgagagatggagtccaaggagattactctggaactttaaggtttaatgactgccctattgggtttcagacttgcatgaggcctttgttttggccaatttctcccatttggaatgtgtgtatttacccaatgcctgtactcccattgtatctaggaagtaactaacttgcttttgattttacaggctcataggcaaaagggacttgccttgtttcagatgagacttgggcttttgagttaatgctggaatgagttaagactttgggagactgttggaagagcatgattgtgttttgaattgtgaggacatgagatttgggagaggccaggggtggaatgatatggtttggctgtgtccccacccaaatctcatcttgaaatattattcccataattcccttgtgtcgtagaaggtaccagatggagacaattgaatcatgggggtggtttccgccatgctgttcttgtaatagcggatgagttctcatgagagctgatgcttttataaggggcttccccctttgcttggcactcattttcctccctgccaccgtatgaagaagaatgtatttgctttcccctccaccataattgtaagtttcctgaggtctgccaagccatgctgatctgtgagtcaattaaacctcttttctttataaattacccagactcgggtacgtctttgttagccacatgagaacaaattaatacagcattcttgcctgacagtttctttctttcagcactctgagtatatcatcccattctctcctggcctttaagttttcttctgtgaaatctattgttagtctggtaggggttttcttatatgtgactagatgtttttctctggctgtttatagaattctgtctttgtcttttattttttacagtttgactataatgtgccttagagaagtccttttggcctgtatctatttgggattctctgagcatcctatatttggatgtctaaatcttcctaggcttgggaagttttccgttattattttgttaaataggtgttctatgccttttctctctgatacacccaaaatttaaatatttggtcaccttatgatgccccatatattatataggctttattcattctttttatgctttattctctttttgtttttatctgactagattatttcaaaagacctgtcttcaagttctggaattatttcttctgcttcatctaatctttttttttttttgtagctctcaactgtattttttatttcactcattgaattcttcagttccaggatttccgcttggttcttggtaaataacttctatctctttggtgaatttctcattcatattctgaatttttttcctgatttctttgaattttttattttttgagatgggggtctcactatgttgctcaggctggcctagaactcctgggcttaagggaccctcctgcttagtgaggattataggcatgcatcaccaaaacactcaggtagtctttgtattgtttatccgtgttctcctgtatctaattgagattctttaggttcattattttgaattattcttcaggcaatttcacaaatttcgttttcattggaatctgttactggagaattattgtgttccttctgaggtgtcatatttccttgccttttcatgtttcctgtattcttacattgatatctatgtatgtggtgtagcagttgcttcttccaattttttggattggttttcataggggaagactttttgctgttgatgtatctatggtgttggttgggtaagtcactttagctttgactgggtgcatgcagcagtgtagtctctatatgatttctttaaccataaacatcatgagtggtatctgtaaattcctcagcatcttaggctgcagttgttagcagaggctacaatgaggctttgctggggataggggtgccatgtgagccagtccttgggtcccagtggtggcagcggcaggctgggtgtacctgtgcctcggcccctgggggggatacacagatgccagtagtggtgaacaaagtgaggtgaaccccagatcttcagagagcacgctttggtgctggtggcagttgttctgggcctgttttttgagatagagttttaccttttagcccaggctggagtgcaatggcacgatctcagcttactgcagcctctgactcctggattcaagggattctcctgcttcagcctcccaagtggctgggattacaagtatgcaccaccacacctggctaattttgaatttttagtagagatggggtttcaccatgttggtcaggctggtctcgaactcgtgacttcaggtgatccacccaccttggcctcccaaagtgctaggattacagccatgagccaccatgcccagcctgttctaggcctgttgttaggtctcctgatggtacatgcatgtgcctagggtgactgatagagcagagcaatccccaggacccctggtagtgtgcttggccacctggaggacagtgccaggccatgcaggcctgtcctcaggcccccccagtggcattcatgcatgcaggctgtgacgggaagggaaaggcactgtgcttgggtggtggtggctgcagtggtggtggatgggaagagcctgtcctcatggtgtctgcaggtgcaaggtggccctgctgctaggagtgggggtttgctgtcaatggcagcagccccaggaaggtgtctctcaagttcttgggactttgtctacctttgtcctggggacaggctccccactgtgctccactgcgctccactgcctgttccctggtacgtaagacattatgtgggctgcagcgctggggatcctgctacattcctgggtccaactactgtggcactgcggtagtcttctggatggatctgaagggatatcagttggactccatggacaaggagatgcaggggctgttgggtcccagggcaggatgtagtctggtggggactggcttctccaaatggcactgtgctgcaactacctgtgtgttgggggatgtgtggaacccagagtcagctccctctctggagtaatgttgtcacatgaactccaagcagcaccttatactggtctcatggcccatgagggttgaggagctctcccacagctaggatttcaggagttcatggtgggaatgtgcactgcaggggatctctcacttaccctgttcctgcactgggaaccccccaacctggtgctcccagctgatccaggctgggccagctgccttgtttccctccttccaggccacagatgtttcctatcacttctctgctgaattccagtgttttctcttagttgctgtattcaaagtgtgattatctacccactgtttaattcttctttggggaggaggtgagtgccagatgcctccaatctgccatgttgaactgcctctgtatttctcatttttaaattgatatataacacatttacaacacagtacacaagtcttaaatatatagttcaagagattttgacatatgggccaggcacagtgactcacacctgtaatcccagcactttgggaggccgaggagggcagatcacttaaggtcaggagttccagaccagcctgtccaacatgatgaaacccgtctctactaaaaatacaaaaaaattagccaggcatggtggcatgcacctgtaatcccagctgctcgggaggctgaggcaggagaatcacttgaccctgggaggtggaggtcgcagtgagccaagattgcaccactgcattccagcctgggcaacacagcgagactccgtctccaataaataaataaaaatacaaaaattagccagatgtggtggcgcacacctgtagtcacagctactcgggaggttgaggcagaagaatcacttgaacccaggaggcggaggttgcagggagcccagatcagccactgcactccagcctgggtgacagagcgagactctgtctcaaaaaaaaaaaaaaaaaaagaaagaaagaaagaaagagaagaaattttgacatatgaattcatccatgcagccacttctcagaaaaaaatatggaacattgtcagcagaaaatttccttctaccccattctggtcagtttacacccactccttccagaaagcccccaatttgagtcccatcaaaggttagttcttctgcctattcttgaaattcatgtaaactcaaaatcttacagaatgtattcattctgtttgggtttcttaactcttgtgagattcatccaaattgttgtttgtatcagtactttgctttttcattactgtatagaattccaccctctgaatatgccatgatatttgttttcattcacctgctggtggccacatgggttgttccaatttgggttgggatagtctaactaaagttactataaatctttctattttgcccttgatgttattagaccctctttggttaactgggtggagtgtggaggaaaactgcctggattcgaatctcagctccaccatttaccagctgtgtgaccttgggctagtttcttaatctcgcagtgcctctattttcccctatctgtaaactggaggtcacatgatctactgcagggtaggaaagttaaatgaaggagttttataaagctgttggaaatgtgcctatcataggtatgaaataaacaactatcgttcatctccaactcccaaaaacaaaggaaattcccatgaatgagagcatccgcagaccaaaagagcagatcctggaggtcagagggcatggtggttccaggaactaggcggtactgcctgcccacccctgccctacgtagggaggcataacaaagtcgctttccattagaatgaattgaattttattaaaagcatcccatcgctcaaccatgtcatgagtggaggagtccttctccctgtcaaccccagaccatcccccaacacctccctgaaattcctgcaaggtcaggccgatctcaggctctgactcctttcactagcctttctggtgatgtgatcttacccagcttcctgtttgtcttcctgagagacagtagatttagaaagtgaggatcagagggtggaaaataaaagctgtggtccccaggagtcctgaacatctggggacagcgggaaaacatgagtgactccaaggaaccaagggtgcagcagctgggcctcctgggtaaggctgggttggaactctgggatcctgggtaaggggaagggatggcccaggctctgagctgatgtctgtcaattcagaagaagatccaacaaccagtggcatcagactttttccaagagactttcaattccagcagatacatggccacaagagctctacaggtaggcaagagttagggagcagatagtggaagacagagcctcccagacccctgggtcctggggaggtaggtgttggggtctggaatcctgggttctggggaaggaaggtctgagacctgggttcctgggtcctgaagaggacggggtagggatctgaactcctcacacctggggaggtgggggttgaggcttgggttcctggggcctggggaggtgggagaggggttctggactcctgggacctacagaggtgggggttggaagctggacacctgggtccatgggaggtagggactggagcctggactcctggaaccagaggaggtgggagaaggggcctggattcctgggtcctggggcaggtgagaactggggactggaatcctgggtcctggggaggtgggagctgggaccagattactgggtcctggggaaggtgagaactggggcctgaattcgtgggtcctggggaggtagaagcaggtatctgggttcctaggacctggggaggtgggagcttgggcctgggttcctcctgggacctggagatgtggaggctgggacctggatgcctgagtcctggtgttgcaggataatttaggaatcacagagatcaaggggttgaggaggatttattattattattattatttaggtgcaccagcccagtcagattaacatccaaaaagactgagccccaaacaaagagtcaagttaccttttaagcatttcatggggtagggggagatctgtgcagggggaagcatattacagaagcgagaaacaaagatagttattcaattgagacatgcattacgtcatttcttatttttcaaggaaaaacatgttttacaacttgagtttatctgcctagtgaccttgcagctgcacagctagagaaacagggtcttcacaatgcctgggaaagggagagataaggctcactagccacacacagaaaaacaggcagttaattcttttttattttatttatttagtttttatttttatttatttatttattttttttgagacagagtcttgctctgtcacccaggctggaatgcagtggcgccatctcggctcactgcaagatctgcctcccaggttcatgccattctcttgcctcaccctcccgagtagctgggactacaggcgcccaccaccaccacgcccggctaattttttgtatttttagtagagatagggtttcactgtgttagccaggatggtcttgatctcctgaccttgtgatctgcctgcctcagcctcccaaagtgctgggattacaagtgtgagccaccatgcctggccaaaaaggcagttaatttttaaaggattccacctctttctcttcctcagggggaattgggttttcttacatacaactgagtttttgcttacacattctttaatttcttttcattcctgttccactggggaggtggacgcaggtacctgggttcctgggacctggggaggtgggggttgggacctaaactcctgggacttggggagggagaggctggggatggggttcctgggtcctggggaggttagagctagggcctggattcccaggtgttggagtggagggggctggggctggggttcctgggtcctggggtgctgagggattaggccaggctctccctgggccaggctcaggtgggaacactggcaggctgacgcatgtatcctctctcagggtgtcttggccatggcgccctggtgctgcaactcctctccttcatgctcttggctggggtcctggtggccatccttgtccaaggtcaggggcaggttctgagggtctggggtccccaggcctggccttttggctatgaacagagcctggagtggccaggtctgggagggaggtgggactgagagccaagatgttgtccctgggggtctgtaggggcctctcccacagcccctccccactctagagcaggacaggagagggaggaggaggaggggaagaacctggctctccttggccttctgtgctgccttctccaggtgtcagttttcctcatcttcaaaggggattaactgagaccttggctctcacaaatgatgtctctatggggctcagttcagggcttggcacacagtaggtgtttaataattgcagttccttttcttcttggcccagtgtccaaggtccccagctccctaagtcaggaacaatccgagcaagacgcaatctaccagaacctgacccagcttaaagctgcagtgggtgagctctcagagaaatccaagctgcaggagatctaccaggagctgacccagctgaaggctgcagtgggtgagttgccagagaaatccaagctgcaggagatctaccaggagctgacccggctgaaggctgcagtgggtgagttgccagagaaatccaagctgcaggagatctaccaggagctgacccggctgaaggctgcagtgggtgagttgccagagaaatccaagctgcaggagatctaccaggagctgacccggctgaaggctgcagtgggtgagttgccagagaaatccaagctgcaggagatctaccaggagctgacggagctgaaggctgcagtgggtgagttgccagagaaatccaagctgcaggagatctaccaggagctgacccagctgaaggctgcagtgggtgagttgccagaccagtccaagcagcagcaaatctatcaagaactgaccgatttgaagactgcatttggtgagttcctgcacatcaagggtccttgggcctgagatggtctctgtgtgatgtgactttacttgagttaccaaccctgcctgagcctcagtttcctcccctgtgaaatgagaacacggggtaactgcgatcattgcacttggtgttcacagtgggccaggcacacagtagacactcagttcaaccaatccgctgccttctgttctgagctctaaagctgctaattctcccagtctggaagagatggagccaggactcctgggttctcctggggatcagggagagtcttgggaagtagggagaggaatggtctctccccattccaagcggtccacccaacatggacagtcaaggaagggccctgattttcaagggcttgaaggctgggcagatatgggaatatggacaacctaatctgagcccagccctgaccagcctcccccaacagaacgcctgtgccgccactgtcccaaggactggacattcttccaaggaaactgttacttcatgtctaactcccagcggaactggcacgactccgtcaccgcctgccaggaagtgagggcccagctcgtcgtaatcaaaactgctgaggagcaggtacacgtggtgggggtcctcgtcctggcctggggcatggcttctggccaactggggaggaggtgctcagagaggattttgcagaagaggggctttgctctatttggaaagatgggaagagaaggatatgaatgaaggggtcccaggtacccttcaagcaaatacaaaccagatctgaacacatgtgaatatttgggggaaacgtcaaatgtaagcaaaccaccacagcatgctgcaggtgtttaacggccagctctccggagagaaaattcctgatgtgttgtgtttgccaatttccccagtgtaaatatttccactgcggctgatttcaagctgtgatgtgctgtcactcagtgcagagctgaaaggagatgtgctggaccagcaattagtagtgggtccaatgtggctccagtacatgaaacccagtcaggagtaaattcatgtggacatgcaaaatagataaacatgcagcattcacaggagcacatgaggagaggccagctgtgcatgcgtgcctgcatgtcaggacacacatgccatggggatacagatgtgagaggggctcagacatgaggaggctcaggacctgctatatcagaaaactgcaggttaacttgaaagcagaactttctgccaagagacggggaggtggaacctggaaaatgggaagcagagctccctcctgactcctcctctaccctccagaacttcctacagctgcagacttccaggagtaaccgcttctcctggatgggactttcagacctaaatcaggaaggcacgtggcaatgggtggacggctcacctctgtcacccaggtagattctgggagaaagggacactgtatccagtcgggctgggttcctgcaactctgacttgagctttccctgggggtcccccccaacctccctgaccccataggactaagagtctggggttttactgagttgaggaaggtggtcttcatacccacctccagacaggatgaaaggtgccaagaattccaccagcagagctgcaggaggagcttgccctgtgggtaggtgtgttaaaatacagtgtattaataggaagtctgaagtctagtaaggccaccagctcaggagacaattgccatttacacaaagtgagtagcttatcctacccacaggttcctagagggcgcacatttcacagcagggggccgctggggaagcagcagggtctgtcgtgagggaaagtcatggaggggactgtgggccagagcttttattatggtttgcatggggagaaaagggcaaggccaggcaagcaggcttcagatgggcagatatgaagcattttgtgggctctggggcatagaggctgcctagcggcctgacacctggccttggggtgattagggcagaaagatagtggcttggagtgcaagagcccaataaggcaggtggttggcagtacagaccccagactggttggtttgtattttaaaatcacactctcggccaggcgcggtggctcacgcctgtaattccggcactttgggaggtcaaggcgggtagatcacgaggtcaagagatcaaaaccatgctggccaacacggtgaaaccccgtctctactacaaatacaaaaattagctgggtgtggtggcgtgcacctgtagtcccagctactcaggaggctgaggcaggagaatcacttgagcccaggaggcggaggttgcagtgagccgccaagatcatgccactgcactccagcctggcaacagagcgagaatctgtctcaaaaaaagaaaaagagaaagaaaagaacaaaggataaaaaagaaaatcacagcctcagtaggagtcctcccaaggctgggatgcagcaagagaggcaggaactgaaggcaacatgactcgggcatattatgaggtgtggagagcaatgcatgtccagcatacacatgtagggcagatgttaaagcatcaatattacagaaggtaggagtgtggctcatctactgggcagggcagaggctcacattctgcatgggctttgcagcttccagcggtactggaacagtggagaacccaacaatagcgggaatgaagactgtgcggaatttagtggcagtggctggaacgacaatcgatgtgacgttgacaattactggatctgcaaaaagcccgcagcctgcttcagagacgaatagttgtttccctgctagcctcagcctccattgtggtatagcagaacttcacccacttgtaagccagcgcttcttctctccatccttggaccttcacaaatgccctgagacggttctctgttcgatttttcatcccctatgaacctgggtcttattctgtccttctgatgcctccaagtttccctggtgtagagcttgtgttcttggcccatccttggagctttataagtgacctgagtgggatgcatttagggggcgggcttggtatgttgtatgaatccactctctgttccttttggagattagactatttggattcatgtgtagctgccctgtcccctggggctttatctcatccatgcaaactaccatctgctcaacttccagctacaccccgtgcacccttttgactggggacttgctggttgaaggagctcatcttgcaggctggaagcaccagggaattaattcccccagtcaaccaatggcatccagagagggcatggaggctccatacaacctcttccacccccacatctttctttgtcctatacatgtcttccatttggctgtttctgagttgtagcctttataataaagtggtaaatgttgtaactgcagatccagcctcatctgattcaactttgtgtaataaaatggcgagttgcttttccgttgccataggcccccaggttgcaagttatgtgcactggtcatgcccagatgaaccaagcaggcaaccatgggcggaacctatgtgcttagactaaggaagggggactgagttaagaagtgaacaccacatggcatgatccatgatccaatcagattgagtcctggcatcactctatggcatgatccaattaggccaagcctcccacatcacctcattgcatgatccaatcaggttacacctcactaccctctgtgtataaaatcttcctcagcctccagctcagagagacagatttgaaccagattcctgtctccttgcttggctgtcttgcataaacttttctctctataaaaacccagtgttgggtcaggcatggtagctcatgcctgtaatcccagcactttgggaggtcgaggcaggtggatcacctgaggtcaggagtttgagaccagcctggccaacatggtgaaaccccatctctactaaaaatacaaaaaattagctgggcatgctgggcggtgcctgtaagcccagctactttggaggctgaggcaggagaatcatttgaacctgggaggcggaggttgcagtgagccaagatcgcaccactgcaccactccagccagggcgacagagcaaaactccgtctcaaaaacaacaacaacaatgacacacacaaaaaaaaacccacacagacttcgcctcccttctaccatgttgacctcaaggacattccttaataaacagcttgcttgctaaatcccatctcccttagagtcgacctgcaactggcatgagaactgtgaggcttgtttttgttgttgttttttgtttgtttgcttttgttttttgagacggagttttgctcttgtcacccaggctggagtgcaatggcacgatctgagctcactgcaaccttcacctcccaggttcaagcgattctgcctcagcctcccaactagctggaattacaggtacgtgccaccactcccaggtaattttttctttttttttttttttttgtatttttagttgagacagggtttcaccatgttgaccaggctggtctcgaactcctgacctcaggtgatccacctgcctcggcctcccaaagtgctgggattacaggcgtgagccaccataactggctgcggcttatttgatatcagtggtccccaccttatttggcaccggggaccagtttcatggaagacaatttttccacggaccaggggaaggggatcatttcaggatgattcaagcacattacatttattgtacactttatttctattattattgcactgtagaatataatgaaataattatacagctcaccatcatgtagaatcagtgggagccctgagcttgttttcttgcaaatagatggtcccatctgggggtgatgagagacagcgatggatcaccaggcattagattctcataaagagtgtgcaacctagatccctcgtgtgtacagtgtacaatagggttcccactcccatgagaatctaatgccaccgctaatccaacaggaggcagcgctcaggcagtaatgcaagcaatggggagtggctgtaaatacagatgaagcttcactcgctcgccctctgttcacctcctgctgtgcagcctggttcctaagatgccacggactagtactggtggcccaggggacagggacccccattctacatcatctaccagaggctcctggagaaactgagccccagttgcccacatgggtcataagctcgtccatgcctgtaaattggcttccttccttttcctacctgcccctcttcactttcccccttgtcttctggtacttcttggaacctcctcccagataaaccacttgtatcaaaatccttgtcacaggctttgtccctggtgaaactcaagccaaacttatagtatgttttgacacctgtcagtcatggttcttctccatcaaaatgttctcagagattcttgtgcaatttctttttttagatgatttttacatgactctagctttgaaggtcttactttactttttgaataagtcatgtgtgtgcctggaaccaaaacccatcaatctctacagtgataatgaaagctggctcccggctgggcgtggtggctcacgcctgtaatcccagcaccttgggtggccaaggtgggtaaatcacctgaggtcaggagttcgagaccagcctgggcaacatggtgaaaccccgtctctactaaaaatacaaaaatttgctgggcgtggtggcgcgtgcctgtaatcccagctactcaggtggctgaggcaggagaatcgcttgagcctgggaggtggaggttgcagtgagctgagatcacaccattgcactccagcctgggcgacaagagggaaacttggtctcaaaaaaaaaaaaaaaaagaaaaaaaagaaagctggctccctccccattctctgatctgaagaagttactcttcctagctgcaacctctttatcatattccagataatccacttgtcaaatttgtttaaaatctgtttggcaatccttcaaaagactgttgaaaatctatttgtgaataggtggagcacagaggattcttagggcagggaaactaccgtatgatactgcaacatcactacacattttttcaaatcacagaatgtacaacaccaagagtaagccctgatgtaaattgtggactctgggtgacaatgatttgtcagtgcaggctcatccattgtaacaaatgcaccactcactctgtcgaaggatgttgcataaaggttgttaatagtggtacaagcaagttgctcagatattaccttgtgttggtgctctccaaggctcagccctacccaacaaaatcttatgcgttgatatttaattttagggggcaattggcagaaatgtctatcaaggcgaatgtgaatgttttggggaaaacgtcaaaggtaagcaaatcaccgtggcctgctgcaaatgtttaacaaccagctctcaggagggaaagtatcagtgctttcagaaaacttaaagtacttttcagaaaacttaaaggccaggagagaatgggatgatatattcagagtgctgaaagaaagaaactgtcaggcgaatgatactgctgtaatcctttgcagtgagtcactaagtccagccccactcaaaggggtataagaatgtgtgaacatacgttaaaacctccatgctaattagtaagtatttgagggggaggtgatactttgaggttacggatctgctgcaactcggctcttgcctcatcagaggaaagaattcatccaagaagagtaagacagaaagtgagactgaggcaagttttagcgaaggagtgaaaatttattaaaaggttttacagcaggaaaaacaggaagtaaagtacactcttggaagagggccaaccaggcaatttgagagattgaggtgctcagtgcgacctttgacttggggtttaatgtgctgggatgctctggagtttcacatctcttctcccctgattctttcttgttgagatggagtttcattcttgtcacccaggctggagagcaatggcagtcttggctcactgcagcctctgcctcccgggttcaagcaattctcctgcctcaacctcccgagtagctggtattacaggcacctgccaccacgcccagctagtttttttgtatatttagtagagacggggtttcgccatgttggccaggctggtctcaaactcctgacctcaggtgatccacctgcctcggcctcccaaagtgctgggattacaggcgtgagccaccacgcctggccttccctgattctttcactggggtgcgctgtctgcatgcgcagtagcctgccagcacttgcggggggccacgtgaacagtgtatttactgaagttgtgcacatgcttatttcaggtgtttttccgttaccaatctagtggtcctagaggaaggtcatataccaggtaaactccacccaccaggtgcggtggctcacacctgtaatcccagcactttgggaggccaaggtgggtggatcactgaggtcaggagttcaagaccagcctggccagcatggcaaaaccccatctctaccaaaaatacaaaattagtggggcatggtgacatgcgcctgtagtcctggctatttgggaggctgaggctcgagaatcacttgaacccaggacacagaggttgcagtgagctgagattgcgtcactgcactccagcctgggaaacagagcaagactctgtctaaaaacaagcaaacaaacaaaacctctaccgattgcctcttggtgcacatgcttgagctgacttgcccggctcctgagatcttatcaggaagctgccaatcaccagctccaggtgttttctgtctattgggagcctgcctttccctaggaccagcggcccaattattattttagagaaacagtttaacaaccacctgatcatcaccttgtagcaggggggcgtctcccaccgggctcatgtctgcctacctacctactccctactctaaatggggagactgggccgggcgtggtggctcacgcctgtaatcccaacactttgggaggccgagatgggtggatcacgaggtcagaagatcgagaccatcctggctaacacgtgaaaccccatctctactaaaaatacaaaaaattagccaggcgtggtggtgggtgcctgtaattgtagctactcaggaggctgaggcaggagaattacttgaacccgggaggcagaggctgcagcaagaagagatcacgcaactgtactccagcctgggcgacagtgtgagactccatctcaaaaaaaaaaaaaaaaggccaggcgtggtggctcacacctgtaatcccagcactttaggaggccgaggcagacggatcacgaggtcagaagagattgagaccatcctggctaacagggtgaaaccccgtctctactaaaaatacaaaaaattagctgggcttggtagcgggcgcctgtagtcccagatactcgggaggccgaggcaggagaatggtgtgaacccgggaggcggagcttgcagtgagccgagattgcgccactgcactccagcctgggttacagagcgagactccgtctccaaaaaaaaaaaaaaaaagcaatttgggaagggctgagctttggagagtgccaagacatggtgatagctgagattctttgtggccctcaaagaaatagttttcttccccttgggagcaatgttaaccctgttgaggcacggaagagagtatgaaaagacaaaaagagagattctatagtagagaaacctggcagataccaccttaaccgaggctagcattgtcaataaaaggcatgttcacgtggatatcatacacacacccccataggatgtgactagaaaggcacctagcctttgtgatattctttttttttttttagatggagtcttgctctgtcacccaggctggagtgcagtggctcgatctcagctcaccgcaacctccaccacccaggttcaagcgattctctggcctcagcctcccaagcagctgggattacaggcgtgtaattacaggtccggcaccaccatgcccgggtaatttttgtatctttagtagagacagggtttcaccatgttggccaggctggtctcaaactcctgacctcaggagatccgcccacctcggcctcccaaagtgctgggattacaggcatgagccactgcacttggcctgtgatattcttaactccaaactaacaacctcgctctaaccattggagaacactagaaaaatccgaatcaaggaccattcaatacatgcctgatgaatactcttcaaatctgtcaatatcgtgaaagacaagaaacctgtcagcatttgcaggagatgcaggagaagtgatgactgatacgagctgaattttgtctcccaacaacttcatacattgaagtcctaacccccagtacctcaaaatgtacttgtatttggaaatagggtctttgtagagatgactaagttaaaatgaggtcatgagagtggattctaacccaatatgactggtgtcctttttttttttttttttttttgagacagggtcttgctctggcgaccagactagagtacggtggcacaatctcagctcgctgcaacctccacctccagagttcaagcgattttcctacctcagcctcccgagtagctgggattgcaggcatgcaccaccatgcccagctaatttttgcattttttagtacatgttgatctcaatctcctgacctcaagtgatcctgccgcctcggcctcccaaagtactgggattacaggcatgaggcactgcgcctggcctatgatgaactgtccttctaaaacggggaaatatggacacaggcacatacagaggaagacagctgaagacacagggaagaggggaccagatataaactaagaagagacacctgcagtggatccttcccccacagcccagaaggaagtaactctgccgacacgttgatcctggacttccagcctccagaactgggacagaatggatttctgttatttaagctcccctctccccagccagtggtgctcagttactgccgccaggcaaattccatcactacctgaatgcagtgtgggatcctggatgggatcttgccacagaaaaaggacacccatggaaaaactaatgaaatccgaacgagatctatagtttctagttcagagtattgcaccaatattaatttcttcactttgacatatgtacaatggtaatgcaagatgttaacatcggctggttgtggtggctcacacccataatcccagcactttgggaggccaaggtaggtggatcacctgaggtcaggagtttgagaccagcctggtcaatatggtgaaaccccgtctctactaaaaatacaaacattagccaggcatggtggcacccgcctgtaatcccagctactcaggaggctgaggcgggagaattgcttgaacccgggaggcagatgttgcagtgagccgagatcacgccattgcactccagcctgggcgacagagcaagactctgcttcaaaaaaaaaaaacaaaaacaaaaacaaaaagatgttcacattaaaggaagctgggcaaaagatatagagaaggctctgtactatctttgcaacttatctgtaatctaaaacgattgcaaagtaaaaagtttgaaaaaagactcaataaacctatttaggattccactctttaggattccacttatatgagctacccagagaaatttataatgaaagaaagtagaggccaggcgcggtggctcatgcctataatcccagcactttgggaagccgaagtgggtggatcatgagatcaggagttcgagaccatcctggccaacatgatgaaatcccgtctctactgaaaatacaaaacttagctgggtgtggtggcaggcacctgtaatcccagcaactcgggaggctgaggcaggagaatggtttgaacccaggaggtggaggttgcggtgagccgagatcatgccattgcactccagcctgggtgacaggaggagactccatctcaaaaaaaaaaaaaggaagaaagaaaagaaaaagaaaaagaaagcagaatggtgattaccagggactggggagaaaaaggaataggacttagcgtttcacagggacagtgttttagtttggaaagttgaaaaatcctggagatggatggtggtgatggttgtacgacaatgtgaatgagcttaatcccactgaactgtacacttacaaatggtcaatgttatgttatatatcgtttaccacaatttttaaaaaaagctctatcaaaaaatctatttaggatttttattgggatgagcatttgttttactctaggattttttttttttttttttttgagacggaatttcactcttgttgcccaggctggagtgctatggcacgatcttggctcaccacaacctctgcctcctttgtacttttagtagagatggggtttctccatgttggtcaggctggtctcaaactcccgaccttaggtgatccctgcctgccttggcctcccaaagtgctggaattacaggcgagagccactgtgcctggcctactctaggatttttaggatggaggaaacccattcaatgattaggagagacaagaggtggaaataaaggttgtattacttaggggtcctgggtagggagggcatggcacttccagaggccacaaacacacatatacacacacacacacacacacacacacacacacacacacacacacacacaggtcagggagagcttttgcagggagacagaggggaagcaaccagtgtgacaatgccgtgattaggtccagggtgttatccacacaggtttccctcagggagttttaattggtgggtttcatggaagcaggcgtgagtctcaggaggtcaggctgtgactgagaggtggtcactgcaccatatctgcagtccgtgtaagatgtggatgggtggtgtgggggcctgcagagccaatcaataggctgtgtccagctgccccataggcaggtggtcatcggggggaagttggataaagcagatctggatcaaccacattgaggaactaggagcaggtggggaactggaaactgtgtcaaggctgactgagccctgtttttggaaggagagtcaaacatattcagaaaggggctgacgcaacacaaattagaggaattcactacagcattcgatttataaattcattttggaagaaatagcctttctgaaatactgagtgttttggggggaaactcatcctgtgtctttctttattcagatcttagttaagcatgggagatttacccatattcttcttacgactattctttaatgtttaaaagcttttcttgccctgtgaacagggtttgttttctcctgcgtttgcaaatactcgttacttcaaccaaacaaagctgctccttttatagagaaatcttgctgtgagctctaattactcctgaagttaagcctctagaacttcctagatacgtgattatggcttcaaactacagtcagctttgactcttgctttcaatatatttataggtcttatttatttatttatttatttctgtctctctttttttttttttttttttttttttgagacggagtctcgctctgtctcccaggctggagtacagtggcgcgatcaaagctcactgcaacctccgcctcccaggttcacaccattctcctgcctcagcctcacaagtagctgggactacaggtgcccgccaccaagcctggctaattatttttgtatttgtagtagagacggggtttcaccgtgttagccaggatggtctcgatctcctgacctcgtgatccgcccgcctcagcctcccaaagtgctgggattacaggtgtgagccaccgcgcccggtctttttttttttttttttttttgagacaaggtctcgctctgttgcccagactggagtgcagtggcacagtcatggctcactgcagccccaaacccccaggctcaaatcctcccacttcagcctcccaagtagctggaactacagatgtgcaccaccacacccggctaatttttgtattttttgtagaaacggggtctccctatgttgtggaggcttgtcttgaactcctgggctcaagcagtcctcccaccttgaccttccaaagtgctgggattcacagacgtgagccactgtgcctgggcttctttttattttcttactgcattgggaaaacagcaagagggccatctttattttgttcttgactttaccaaatgcagttctcatatttaattattaaggagtttctgtaggattgtggaaattgccccttatcccaccagtatcaggcagctaggggctgttgtaagcaactaccatgaactgggaggctccaaacaatgctaatttattatctcacagtcccggaggccagaagtctggaatcaaggtgtcagcagggccatgttccatctgaatcatgtaggggagaatccttccctgcctctccctagattctggtgattgcctgttgggagccgaaaaggccaaagggatcgtgaccaactcagcattccactggaagctgtatgatcaaacagcaaagtgtttatcatgaacgcaggatgtgggcaaactcacgactgcgcctaccgccagaaggtttgctgagggcaatcactccctggcaccacgctcactggggttatctactgggacatctagagcctattgctcgaagaatgcagccttgcaagcctgctgtaaatcaagccgctgactgacaaccaccccccgcccccatctcctttacccaataaaatgcaaaggggtctaaagctcaaggtacttgttcactagaaagaagcaaggagccccccgaccccttcttccaaatatactcttttgtctttatctttattcccacattcatcatcctttgttcagtccaacagggatggaatccgtggcaaagtggcgacccagaacagggacttgaggacgttgcaaagtggcttctgaacacagagaccggaggacgtgaacgaagaaggtcggctggagcagaggaaccgaaaacgacaagatgaatggggaccccgagacaagcctgccagcagcggatataaggtcagtgccctaaagaagtactgggaacgggaagttttctgaatcagggtaacatgcggcagaatttgtctgttgaagaaaaacatgtgcacttgcttcaagttctgttgagacagtctggagctcaggttaattcgcagatactaaccaacctcctgcagaagccacaaatggttattaacgcataacccatggtctccacaggcaggcactcttgatgtggaaaactggaacagagcgggagaaggattgaaacatgctcatcaaaaaggtcttaaagttgattcttctgctttctgtacttgcagtctaattcgtactgtacttatgccgttatctccttattattctgcgggacagcaggctgagtctaaaaatctgaaagaatctgttgtcccacccacagcttcaattgaaaataaaaaacaggagagggaggataaaaattggcctatactgcctcctccagttgcagaaacatctgtgccgcctccttcggtagcaggaatagagaccccaatacaaagaattttacgctctgctgccatagctggagagccctcaggaccttgtgcttttcctatttccgtaaggcccgattcaaataatccacagcagtttattcatgaacacaccccactagagtttaagttgttgaatgaattaaaaaccagtgtagttaatatcggggtacagagcccattcactttaggattgccagaatctgcatttggtgctatgcgtcttctaccctttgatgtaaaacactgggctcgaacttgcttgtctgctagtgcatatctgacatggaatttaaatgggcaagaaatgtgtacagaccaggttagacagaatcgtgctgctggacacggagacatcgcagaggatatgctattgggtaatggcccttattcagacctggaacatcaaatggaactaaacgcgcctgggccacaattcctgaagagggagtcccagtacaatcctttttacctttcatggaagggtcacaggagccctctgcacaatttcttgcaagattacgagaggcagtgaagtgtcagattcctcatgccactgccgcagaggcgctaaccttaactttagcttctgagaatgcagacgcagattgtaaacgtgcactggcacccgtgaggtgtactaaaaacttgggaaattttctcagagcttgtcaggatgtaggaattgagcttcatcgctctgcaatgttagcggaagcaatggctgatttagtagttgacaaatctaaaaggagccaaggattaagccctcaagtgggaaaatgttataattgtggaaaaactggacattttgaaaaagaatgccgccagatctcaggacagagaggaccttataatgcagtaccccccccctcagtggaaaaaacgccaggacttttatttacttttatttacccaataaaatgtgaagggctttaaagctcagggcccttgttcagtagaagcaagaagcccccgacccctttttccaaatatacttttttgtctttatctttattcctgcatttatcatcctctgttcactacaacagggatcaaggtcagtgacagttgccgacaacctttggcattccttggcttgcagaccctttgctcgactctctgcctcttttgtcacgtggctttcttccctcttgccgttttacataatcttctctctgtacctttctcctcctcatataaggacatagtgatactggattagggaccactctcatgacctcaccataatgtagttacatcagcaaagaccctatttctcggctgggcacagtggctcacgtctgtaatcccagcactttgggaggccgaggcaggtggatcacctaaggtcaggagttcgagaccagcctgaccaacatggagaaaccttgtctctactaaaaatacaaaattagccgggcgtggtgacacacacctgtaatcccagctactcaagaggctgaggcagcagaatcacttgaacccgggaggcagaggttgcaacgagccgaggtcttaccactgcactccagcctgggcaacagagtgaaactccatctcaaaaaaaaaaaaaaaaaaaagaccgtgtttcccaattttaaaagtcacattcacagataccagaggttaggcattcagcatgtctttttgggagctataaatcaacccactaaaccacggacatctttatttgttcttcattttacctaaaatgtttctcatattttagtgttatgtaagatatttctgtaggatcccagaaattaccacttctcaaattaagaaagctttattctgttctctctttattaagcatttagtttttgtgcctgtcttcatttttaaatgaataatgggtattgaatagatatatctcataaatgtaatgtagagaggacaaaaacaagttacggaaggatatagaccatgtggtaacactcctgtaaagttttcagatgtgcaaaacaaaccagcataggtcaggcatggcagctcatgcctgtaatcccaacactttgggaggctgaggtgggtggatcacctgaggtcaggagttcaagatcagcctgaccaatatggtgaaaccccgtctctactaaaaatacaaaaattagccaggtgtgggggagtgtgcctgtggtcccagctattcaggaggctgagacagaagaattgcttgaacctgggaggcagacgttgcaatgagccgagatcgtaccactgcactccagcctgggtaacagagtgagacttcttctcaaaaaaaaaaaaatccaaaatattgtccttgggtacatgcataattattttaaataggataaacaccaagtttgggagggcagttaccttggggaggggaataggagcagggtggggtacaagggacctccactctatttgttatgatttgttacgtaatgatgctttacttttaaggtgatctgaaatacatgaagatgtcaaaacttgaaaaagccgagtgaaaggcatagcgtttatatttgtttctacaaacctctttgcatgcttcgtaataaaaaagcaaagccaaaattcagagcgacaaccaatgtgccacatgccctttgcagtgggctggcttccctggttacagcaaccctctcatctctgcagagaatggaaaccagagtggtcatggccttggagctgaatcttgtgactttcaccttcttcccacatttgtccaaacctcttgtccctgctcttcaggtccttgtgtgatgtgacccagctgacaccctagccccagatgactgcccctgaattagtctcagcttctccaacctgttcccttatcctctattcttgcatgtgctgataccgtattgagaacgttctttaatgttatttatctcctctggaataattctgactccctcctcaagcatcacctcctccaggaagccctctcggatcctccaggctcagccagtgtctccagtggtcctcacagtctcctgtacttcccaagctcatcatattgtcttcaaattccgtggttacatgttccccactcgcctgagaaacaggcctcccttccttgtcctgggccagggatagatgtggaggtctgctgcctccttctaggacctctcttccgctctcagttaccccgcagcgaggtctgggcacaggacattgatgggcagccttctggcttcctcactaagctggacagctccgccctggctcgccaaggcagcttcagccacaggtgtatccagcagagcctctatctcctccataaggtctgatgaaacactgccatctaaatcctttccccagaacacattcctatggttgccctggacagagattgtgcaatccttgcagtttttctgatttcctccctttgagcacctgtccctaaaagcctcagaatgaagagggcgtgccctccaaaaagttcctgccctacggttaagcctgctgctaagtcagctttcagcgctccgtttctgatgatgaaagcaagatgagtcagatggtttgggaacaagggaacttctagaaagaagagtctaggaagctaagttttgttaacccttcagcgtctcctaagcactgctaacttttaatgtttaacccttcctcctccctctgtaccatagacatccattctgatgtgtttgatacatgcccttacattagttttttaaggaaaatatgcttacatttgcctttcttattgctataaatttatggggtacaggtgtaattttgttgcatgcatagatttcatagtagtgaagtcatatccttaatatttatacatacttggagtgtgtgtgtatgtgtgtgtgtgtgtgtgtgtgtgtgtgttattgaatcaaatcatttctgcttctcccagctctaggctactaagaatctggactgctgctgcctgtacaactagttgattacgatttgtttcatgtgtgtactcactacactttacttactctttgcctgctcagggtcttgtaggttacccccaactctgctactgtaaacaacactgtgttgaacatccttgtaaatgcccttggagaaaccttctctaaaaagtatctctttttaaaatatcagagggtatatgccacctgtatttcactacatacttccagactgttttccaaattactgaactaatttatacttccaccagcagtgagcaacagttcccacttcctcacatcttcaccaacacttaatactatgcatctttttaatggttgcattttaattggtataaggttgtacctcattattttttctacaattaagtagacattaaactttcctgaaatatgtgctcaatctttggcttcttctatgaattgccttttcattcccctggcccatttttcaattgatttttgtgtgtgggtgtttctttgtttgttttgttttgttttttgttttgtttcttgggacagagtcttgctctgtcacccaggctggagtgcagtggcacaatctcagctcactgcaaccaacctctgcctcccggttcaagcaattctcctgcctcagcctccagggtagctgagattacaggcgcccaccacgcctggctaatttgtatttttagtagagacgaggtttcaccatgttggccaggctggtctcgaactcctgacctcaggtgatccacctgcctcagcctcccaaagtgctgggattacacatgtgggccactgcgcctggctggcccttttatgttaattcttctgacctctggaaacattagctatctttatccaaatcctttttacagtattctctaattgaatttaaatttttttctctgcagatatgtcctgtgcattttttttatttttattttacagtcttcctctattacccagctagagtgcagtggcactatcatagctcactacagcctggagcctcgaactcctgggctcaagtgatcctcccacctcagtcttcagagtagctgggactacaggcgcatgccactacatttgactaatttttgtattttttgtagagaggagggcctcaccatgttgcccaggctggtcttgaactcttgggcccaagcgatctacccgcctcagcctcccaaaaggccgggattacaggcatgagccaccgcacctggcctctggtgcattctttattgattcttagatacacgataatttgagttgctattttagaggctttatttttcattaactttctagtttgttgtttctattaattttagtaatgtaatcactctgtgcaaatgctcttcgtagttgcaatctttacatttattcctctatgtaggtgataatatttttttttttttgaggtggagtctcgctgtgtccccgaggctggagtgcagtggcgcgatcttggctcactgcaagctccgcctcccgggttcacgccattctcctgcctcagcttcccgtgtagctgggactacagtcgcccgccaccatgcccggctaatattttgtatttttagtagagacggggtttcaccttgttagccaggatggtctcgatctcctgacctcgtgatccgcccacctcagcctcccaaagtgctgggattacaggcgtcagccaccgcgcccggctggttataatattttaaaatacctggcacatggcaggtattcaatgtttgttgaaagaatgcatgaacattgagagtttttgatgaacctgagatggttctgggtagacatgcgtaacttcattgtttctcggtgtttctttgagagaagccccgtcactgtactcttttcagggttggtaaaagaaaactggggcttctaggctggccgccgtggctcacacctgtaatcccagcactttgggaggtcaaggaaggcggatcatctgaggtcacgaattcgagaccagcctgtccaacacggtgaaaccccatctctactaaaaatacaaaaattagccaagcgtggtggcacgcacctgtaatcccagctacttgggaggctgaggcaggagaatcgcttgaacttgggaggcggaggttgcagtgagccgagattgcatcactgcactccagcctggacaacaaagggagactctgtctcaaaagaaaaaaagaaaaagaaagttgaggcttcctgaagctacacactgcacagccccatccgccacccaccaagtggtagagtcctgcagctcagcagaccacctcctcaacaaaacctctgtttgctctcttctggcacagagggagtgaatcaaggtcaggttcagacccagcctctgaggagggacctgaactggcctggggagctacgccttgggggctttctcaggagccagcaggggttacaatttggtcgggtccagtgtgtccctctcaggcggaaacccagccccaggcccataagagaggggtccaagctccaaagagaagcctccagcaccagcctggggatggagctgcagcgacgaggaccgggaagctggaactacctcaccccgagcccagctcagcccagcccagcccagaaagggcccaaccctgtgattggtccaaccctgtgatttgtccttgggtccctgttgccaggaatccaggccaagaaaatgagaaggaaggaagggagtgcgtaggtccagtgaggacgagggtgaaatttatatctctgcccaggtctcggtgcctgcaccgccatagacaccaccaggtacagcaactggggcgggagctacgaggaggtccccggaggtatgagcaaggagactgccccatccctgccccggtgtctggggtttgatgggggaggggagggaagagccaagacgggccagagtcgtgggtgcaaaaaaaacaacacagagccagttggaccaggggccaattccaactctgccacttagaagctgtgtgaccataggcaagttacttaacctctctgaaactcagtttcctgagaggaacccaggcctctagggctcagtcctgggggacccagcatgccgtccttgttctgccagggcactggggacgctgggtgcactggagcccgagacccctcttcctggccatggctgtcctggtcgccagtactgtgggctgtgattctgagtatcctattgtccaagggtgagtgaccctcaatggggaggggttgcgtctggcccccctggggacacaaaacccccactgcatggcgcaccaactgcgccctggcgtcttgctcgcgtctgagcgtgagcagagtgtgtgtacatctttgggccgtttgcagtcacgcgtgtgcacatggcgtgcacgtatgtgtgcgagtccccacgcgtttgtctcccatcggcgtgtgtgcacatagtgtgcgctatatgcctgcctgcccgcccgctctgtggtcccgagtcgggggaccccgcaccccccgggcaagggaaggatttccgagtccctggccttgcctgcaggagcctctctccgcagcctccacggagcgcgcggcgctgctcggctgccaggacctgctgaggacaaacggtgtgtgcagagccgggcgcctgggcgcccggggcgtgtgcggcgggagcgtctgagaccccagagatggagtcctgggtgcgtgggggccctgtggtccctgagtctggccacggggtgtggaagggagtcccctgagtcctcccaagtgacccggcgggcatgcgttttgggatgggggtcgttccagcctcgaagcagacggcggcgctgggtgccctggaggaggaggtgggagcctgccacagctgctgtgagggggcgcggcccagactatgggcgcaagggtggggtcttgtggccgggatgggaggggggccggaggcgaggcctgcggcgagtggggcggcggggggctggtctccgaagtcccgccccatcctcgcctccctcgcccctctcaccccgcggctcccaggctcggggacgcaggcgctgctgcagaccacgagcgcggagcttggggaggcgcaggcgaagctgatggagcaggagagagccctgcgggaactgcgtgagcgcggtgagggcccgacgcgaccccagccctgagccctggccgcgtcccccgaccccgaccccgaccccgtcctgagtgctgacccctgacactgatcatgcaccccgtcctgaccctgacgctgcactctgaccttgactgccactcctagcgccggccacacccggaccctgcccaggtgtaaccgtccttgaccctgtgccatcctggtggctggcaccgagggtacaatgaccacggacaggggtcctgacctttagctagtcctgaccttgagcccaaccaaaatccccattcccttgaccccgcagtgacccatggcttggctgaagccggcagggaccgcgaggacgtcagcaccgagctgtaccgggcgctggaggccgtgaggctgcagaacagtgagggtgagggggggtaggagggggtgcggtgtaagtggaccctgcccgtgtgcgtcgccggaccccctctttgaccttggcctggtcctgtggctccacccctgagcccgtggggccaaacccctaccccctgcatcctcttggtgcgctctccctggaagcactcgacctctctgacccttgccaccctacaggttcctgtgagccgtgccctacgtcgtggctgcccttcgggggctcctgctactatttctctgtgccgaagaccacgtgggcagaggcgcagggccactgcgccgatgccagcgcacatctggcgatgtagggggcctgggggagcaggtgcgcaggaggaggcggcgttcacccgagggggcgtggccgggcggtggggcggcgccgggggagggggcaggacgggtctgactctgcaggctcaggtgtctcctcctttctaggacttcctgagtcgtgacactagtgcccgtgaatactggatcggccgcagggccgtgcaacacctgcgcaaggttcagggctactcgtgggtggactgagtcccactcagcttcaggtaggggaagggctcctggtgaaacctgggggccacaggttagactctagaggacatgttttgaggccgaggtgggcggatcacctgaggtcaggagttcaagaccagcatgggaaacgtggcgaaaccccatctctactaaaaatacaaaaaattagccgggcgtggtggcacacgcctgtaatcccagctaaccctggatgctgaggcacgagaatcacttgaacccaggaggcagaggttgcagtgagccgagattgcgccactgcactccagcctgggagacagagttagactccgtctcaaaaaaaaaaaaaaaaaaaaaaaaaaaaaaaaaaaaaaaaaaaaaaagtcatgctttggccagatctcagggaccccttggctggggctccatgcttagggatgggcaggctggaccctaggaagtgtccttgggttaaattctgggcgttagtaagttatatcccaggtgtatactcaggttagacacttggggtgtctagcgtagacccaggcaataaacaggctagagcctgggaaggaagtgggggccccgggtccatccctagcttagattcccagcatcaccccccgcccggccattcaaccactgcagccactggttacagggggaacgcaatgaattttgggggtgcgaggcctgtgtcatgattctgggcatggggctgtggatagacccaccacgtgatgagaaggctggccggatctgtcagcagaggcacggtgctgaccccgcccggtgccccagagccgtgcccagtgcccaaaggggtgctgtgcaccatcccggctactggaacccactgccaaggattttcttttccccatccaccactgctgagaaccaatcggccaggcccagccctgtccggtgcctgcactctgggacctctgctctgacttcatgcaaacctaacctaaccttcactggctccaaaatctccatttctggatcccagtggtctgaccccacctctcctcctagccaaggtcaggcaactgaggaatggagctatttggttttcctgcactttcccgcaaaggggaaaatggtacttcctgcaaagctctctttgcagcctgggggagcatcaataaaggtttgagaaatggatccaggctcctggctctggtgagctcttatttatttatgtatgtatttatttatttatttatgtagagatggagtctcactctgtcacccaggctggagtgcagtggcacaatctcagctcactgtaacctccgcctcccaggttcaagggattctcgtgcctcagcctcccaagcacctgggattacaggcgtgtgtcaccatgcctggctaactttttattttttagtagagacaggatttcaccatgttgcccaggctggtctcgaactcctggactcaagtgatctgtctgcctcagcctcccaagtagctgggattagaggcatgcacgaccccacctggctcaattttgtattttttatagagatggggtttcaccatgttccccatgctggtctcaaactcctgagctcaatcgatccacccacctcagcctcccaaagtgctgggattacaggtgtgaaccaccatgcccggccctctggtgagctcttctaagcttcatcccagaagccctggtgtaaaccttgtgagtgacccctgatctctctaagtgacctcatagtcctatgatgcttccaaacccagtgggtaacctgcactaggccaggagggcttgaaggtaggggcagttgtccactcagcactgttaaaattctcagccccctggcacagagtgtggttcagagggttctggggacacaggaatgggtcaaacccagtccttatccccaggacctccacattctggtctagctgggcacaggaacatgatccgtgcatggagcgggtagctgatgggcatgggggagccactttttgttggggtccagcctcaacactacccgtaggtagccaaagtccagtggtgacaaagaatgagaaaagacaaattaagattttaggcctggcgcggtggctcatgcctgtaatcccagcactttgggaggccgaggcgggtggatcacgaggtcagaagattgagaccatcctggctaacacggtgaaaccccgtctctactaaaaatacaaaaaattagccaggtgtggtggcgggtgcctgtagtcccagctactcaggaggctgaggcaggagaatggcgtgaactcgggaggcggagcttgcagtgagccgagattgtgccactgcactccagccggggcaacagagtgagactctgtctccaaaaaaaaaataaagattttaaagctggtccagggggccatttgccagagtgaaggctgcaaaacacccagagctctggttgcctgacaatttattgagaacggtcttttgatctaagaagcggctggtatgggatgaaacggtgaaggagggggagtgtacgtcattggaaagatctgtagcagtagcagttatatgaatttcctttaagctaaaagcatatgtctaactacgaagataatcttcaacttatcaggctgcagctggtggggactggttttacaaggagccaggatgtctggtcacattccaatgcttcaagggagtttttcagcccagagcattctgtgtaaagccgcagagcaggtcatgctctctggccagggaacttaatggcttggggagatgattctcctcaagggccccctactgtagggaccagccccacagggtcggtgggtttttctcccaatgtgtgaagatgagagattgtaaaaataaagacacaagacaaagagataaaagaaaagacagctgggcccaggggaccactaccaccaagacacggagaccggtagtggccccaaatgccaggctgtgctattatttattggatacaagacaagggggcagggtaaggagtgtgagccatctccaatgataggtaatgtcatgcgagtcacatgtccactggacaggtggcccttccctgtttggcagccgaggtggagggagggagagagagagagagaggagacagcttacgccattatttctgcatatcggagacttttagtactttcactaattttgctactgctatctagaaggcagagccaggtgtataggatggaacatggaagctgactaggagtgtgaccgctgaagcacagcatcacagggagacggttaggcctctggataactgcaggcaagcctgactgatgtcagaccctccacaagaggtggtggagtagagtcttctctaaactcccctggggaaagggagactccctttcccggtctgctcagtagcaggtgctttttccttggcactgacgctaccagtagaccacagtctgcttggcaacggggcatcttcccagatgctggcattactgctagaccaaggagccctctggtagccctgtctgggcataacagaaggctcatgctcttgtcttctggtcacttctcaccatgtcccttcagctcctatctctgtatggcctggtttttcctaggttatgattgtagagtgaagattattataatattggaataaagagtaattactacaaactaatgattagtgatacttatatacatatctatgatctgtatctagtataactcttgatattttatatattttattacactgaaacagctcgtgccctcggtctcttgccttggcacctgggtggcttgctgcccacaccctacatttttccataggtgtcctacacagggacgactgactaaactggcaccccataaacctttccaccagcacttgcccccttttctttttattaataactgccattgctatcatggcttgctcacagtgtctggcttctctcccaaggtgtcttcttcacctgtagactaaacataaacagcatagacaaacaaaaattaaagcaaagtttgcagcagttgatcccccaatggttttaatccatttcagaggattcaggtcagagaacccatcaatggttccattaaagacatcagcaccaggtaagaaagttaagtgggcttgagatgcctcaaaaacttgttcctttaattttgctatatccagtgtgggttcacgccattctcctgcctcagcctcccaactagctgggactacaggcgcccgccaccacacctggctaattttttgtatttttagtacagactgggtttcaccatgttagccaggatggtctcaatctcctgacctagtgatccgcccgcctcggcctcccaaagtgctgggattacaggcgtgagccacctttccctctaaatggtgtttaaccttatcccaatgaggcacagaggcattataagattgaggagtaatgcaaaaatcagaagtattccaatcaccctgcatttgtattctatgctccaagttcataattcgatcccccatccaccgtactgtttgacaaagatcgttaatttgattagttaatttttgatcaatttgcgtctgtgtattccaaagcttggaagaattcttttgctactggttaacataatcagcagtttgaacagaagaatgtaaagcaacacctgcggctgcggccgtggcggtaacagcaataatgcccatgattattgctataagagtaaaaataaatctctttgttctgtttaacattccctttagaatttcagttactatgtgtatagaaggagaggcttcccaaggtctattaagggaaacaggtatcccaactccctctcgggctctgacaagcaagatactgttattcttatcaattgtagaatcaatgcaagtgaaaagacaacagtcaagacatgatagagtttgagaatcaggtagaatattgatttgtcctactactaacataaaaggaggtttaacacaaccctgtaatggggttgtccgattggaggtcaaagctacaatatattgaagttttttactatgggtttattttttttttaatttatttacttatttttgagagagtctcgctctgtcgcccaggctggagtgcagtggcgtgatctcagctcactgcaagctccacctcccgggttcacgccattctcctgcctcagcctcccgagtagctgggactacaggcacctgccaccatgcccggctaatttttttttttttttgtatatttagaagagatggggtttcaccgtgtcagccaggatggtctcgatctcctgacctcgtgatccgcccgccttggcctcccaaagtgctgggattacaggcgtgagccactgcgcctggccgggtttatgttttatattctcctttccaaatctgtacggggtttggaccatcattaatttccacagttctgggtgttctgggcttactgttggatcaatcattttagggcgtggaggagccatactgctgccttcccagaagataggaaagtcgccttttattctgtacttttgggtaggtgcctcttcggaatagtcaactgggaagccgcgctcttgacatcccttgggccgtccagtacaatttactgcaaatcgccccttaggggtccagtcaatgacgattccataggagttattttccatcaccacggcactatttgcaatgcaatcttcccaggccagctcctcagcttccttagaccatactgtcaattgttctgggcattttttctttcttggtctaaattgattagtaagaatattagctacacgataggaatttcctgaggatatgactttagttttagattgaaagctccttccactaactatatgaatagaggcctctgacccattatgcgcagggacataaaccatccagctttgtttgtcataatctaaacatcctgctgcaggccccagacatacaggaggagagcgataaccaatggatgcatttattaacattccttcctcctctggatgaatagggccttggttatcagttggtccaggtgtccaaacactatcattaacgtaaacctcaaccgggggttccaaccaagtgacaggcctaattaaaggcgggaatgggccatatgcccaacaggtataattttgtgctgctgtagccccatggagacttaccaccatagcaattactgcaattatagccaccatcatgagtgaatcccaacttctcccccttttttgttttctgtgttagggttttttggttgcagggcgtagatatatgcagccacaggtttgtcaggcgaggaggtcactgctcttattccagctttgcatcccaggattagtaaataacagaagacaaacctgagtataattagcaacatttttttttccagtcaaagagtgacctgtagtgttacttggcatcttagtttactatacagtattaatgaggaaccccactgggggtatgttaatttattttagctaagcagttatgttattagaagctgaggggtggggggttgttaaagtaacagggaagaagaaaggcggatttaagatatgagcttaatagagtgtagtaggtataggtagtaggcaaagtgagagaattaaaaatgaatgaattatttggcttagtcttcgcttcttcagcacaatgtctggggcctatgttgtttgcggaagccgcatttttgaggctacagttcctgtaggatctttcttaggctggctcgaattttttcttctttccgtcatttgatgaggacgtagtcttcaggctggtactggaaattctaggagtggtgcctgtgctgagagactttttaccatctttaaagagcaggttagtgttttaagaaaaacttgtgctttattttaatgtttagtttatagaaaaactggatgatacctttttaactttagcaaatgtttacacacaattttttacaattatcattttaaaacttgcttagaccttcaaaacaaaaattatacaacctttcttgcacaaattcctttttataacatttttcatgactttcacagacaatcttcaacatgccttaactttcttcttttttttttttttctttttgagacggagtcttgctctgtcacccagaccggagtgcagtggcaagaactcggctcactgcaaactccgcctcccgggttcacgccattctcctgcctcagcctcccgagtagctgggactgcaagcgccagccaccacgcccagctaattttgtgtagttttagtagagacggggtttcaccatgttagccaggatggtctcgatctcctgaccttgtgatccgcctatctcggcctcccaaagtgctgggactacaggcgtgagccaccacacccagccaacatgccttaactttgtatgttttataactttccttactaaaggtacatttttataactttcttaatatttcctttcccttcttcctacttcatttctttccttagtctttctttttgcatctttttctgatttctgtctcttctagtctctctcttatttttttctatttctctttctaatgtacaataattagatgagtgttggtaacaatggatatatgtacatatcttagtttccaaaatttagggatgtgtttaacatctgtttgccacaactgattaggttccaatcctctagggttaacacctgtttaaggaggaaacgtgcctgtcagctggtaatctgggcattgtaggataatttgtttagccagtctctgggctagttgaaattgtttagataagtttctccaattttggtggaaaaattgatgtgattgggtggcttggtcaagcagtgatgtcataacctgaaggtctgcttgatcttgccacaagccaatgggccaggcagagatctgtgggctcaaacgtgtgtaataaaaataggatgtgtaccttggtccggcaattgctgaagttgaagaaaaagaggcacacagagtgggctccagagcgaacttaaggctgtaaaagtaatttaataaataaacagaacagcctcagctctccgaatgctagtaaatttagatccagtgattggattacgtggtctccaccagactgccgcttttccatctttaccagacccattagtaaaaccagtcacagctcccgccgggcgcggtggctcatgcaggtaatcccagcactttgggaggccgaggcgggcggataacgaggtcaggagattgagaacacggtgaaaccccgtctctactaaaaatacaaaaaaattagcagggcgtggtggcaggcgcctgtagtcccagctactggggaggctgaggcaggagaatggcgtgaaccgggaaggcggagcttgcagtgagccgagatagcgccactgcactccagtctgggcgacacagcgagactccgtttcaaaaaacaaaaacaaaacaaaaaaaccagtcacagctccttccaaaggggcatcacgagtaattttcggaggaacccatgtagttaattttaagaactggaaagttttatttttaggataatgattatcaatacatccaacaaattctgctaaataaacttgccatgtaactgaattaataaatgcctgtttaacctgatttttatttataggaactataatcttattaggttcagtgccacaaagtttaacaactcgcatacgagcctgtccaattaaaattgccatctgatctaaatatactgtaagtgtttttatggtattacgtggcaaaaaggactattcaactaaatcattattttgaacaataatccccgttggggagtgtgaagtagggaaaacaatgaattgtaaaggcaagtctgggtcaatcctactgacctgggcttgcggaattttttcttcaattactcttaactctttcatggcctcgggtgttagttctcttttactgtgtaaactggagtctcccctcagtattgagaagagattagacatagcataagtaggaattcctaaggtgggccgaatccaattaatatcgcctaacaatttttgaaaatcatttaaggtttatttggtttttgtttttgtttttgagacggaatcttgctctgtcccccaggctggagggcagtggcttgatctcggctcactgcaagctccgcctcccgggttcacgccattctcccgcctcagcctcccgagtagctgggactacaggcgcgcagccaccacgcccggctaattttttgtatttttagtagaggcggggtttcactgtgttagccaggatggtctcgatctcctgaccttgtgatccgcccgcctcagcctcccaaagtgctgggattacaggcgtgagccactgcccccccgcccatttaaggtttttaaagaagcttttctaatttgaaccttttgaggcttaatgctctatcctgtacttgcattcccaaatactgaaaaggagtggttgtttgaattttgtcagatgctttaagcaatccagcgtttgtaattgccttttgcaaagatgaataacattgaataagttggcctctattttttgctgcacacatctggaaattgatctctaacaggctggatagttctgcctacaaaagtctgacaaattgtgagactgtttaacataccccgaggtaaaaccttccaatgatatctggctgcaggttctttattattaactgcagggatggtaaagccaaatttttcgaaatctgcctctgctaaaggaattgtaaaaaaaaaaaaaaaaaaaaaaaaaaaaaaaaagcaatcttttaaatctataataacaagcggccagtctttagggattataatgggggatgggagccctggttgtaaagctcccatcggttgaattacagcgttgaccgctagtaaatcggtcggcatgcgccatctgccggactttttcttaattacaaatactggggaattccaaggagaaaaagtgggtgtgaaacatgtcctttttctagtaattctttaactatttcataaagcgcccccaatttttccttagggatcggccactgttcgacccagacagggcgctgggtcatccatttttaagggaaattgctccttccccgtaatgaacggcagggcgagcctgaattttaattaactggtggctgagcctgaatcatccctttaccgtaattaacggcaggttttgcaacaatgggcgcggcgaaccgcgtctcaggcttccatgcccgcaattcacaaggcttaggcgcgggtggccattccggagcttcccctgagggtgcggtaggttggacggtctctttcatatgtgtttggttagcatatataacctcctgattctccgccttttttaaactggagctagatggtgcactctcctgaccgtcaaactcgtctccttcatttccaaatgctggttcctcctcagtctgcaaaggctcacgtgctgttttcactgccgcccacacagaccaagcggagaaaggaatttcttgaccctctttttgtgcctgtttgaagtcagcccttattttttcccagtctttcaaatccatggagctgtgttccgggaaccaaggagaatattgttctattagctgaaacagggacagaagattttgggtgctcacgtttaaccacagtggcacaataactgccgcaccaaactcaaataattattatgtctactctcagcctgacccacaatttcctgttgttaccctggaattctccgagcgccccgcttacctgcagagcttaaaagtcttttcgttggccggcgcggtggctcacgcctgtaatcccagcactttgggaggccgaggcgggcggatcacgaggtcaggagatcaagaccatcatagctaacatggtgaaaccccgtctctactaaaaatacaaaaagttagccgggcgtggaggcgggcgcctgtagtcccagctacttgggagctgaggcaggagaagggcgtgaacccgggaggcggagcttgcagtgagccgacatcgagccactgcactccagcctgggtgacagagcgagactccgtctcaaaaataaataaataaataaataagtaaaaattaaaaaaaaacttttcgtccttgggagttctccatctgtcggtccttcattttcgacgctcctgcattccttcacccggttgttttggagataccacgttgggcgccagatggtggggtccagcctcaacactacccgtgggtacctgaagtccggtggcgacaaaggaatgagaaaagacaagttaagattttaaagcaggcccagggggccagttgctagagtgaaggctgcaaaacgcccagagttctggttgcctgacgatttattgagcacaatcttttgatctaagaagcagctgggatgaaacggtgaaggagcgggagcgtacgtcattggaaagatgtagagcagtggcggttatatgaatttcctttaagctaaaagcatatgtctaactgctaagacagtctttaacttatcgggctgcagctggtgggggccggttttacaaggagctaggatgtctggtcacgttccaacacttcaagggagtgtgtcagcccagagcattctgtgtaaagccgcagagcaggtcatgccctctggcctgggaacttaatggcttgcggagatgattctcctaagggccccctacagttttccataggtgtcctacacaggggtgactgactaaactggcaccccataaacctttccaccagcacttttgtttcaggctgctggctctggtgagctcttcttttttgttttgttttatttatttatttatttatttatttactttattttttttgagacacagtctcgctgtctcccaggctggagtgcagtggcgtgatctcagctcactgcaagctccacctcccaggttcaggccattctcctgcctcagcctccggaacagctgggactacaggtgcccaccagcacgcccagctaattttttgtatttttagtagagacggggtttcaccatgttagccaggatggtcttgatctcctgacctcgtgatccacccgcctcagcctcccaaagtgctgggattacaggtgtgagccaccgcgcctggcctcatttatttgttttttagatggagtctcactctgtcacccaggctggagtgcagtggcacaatctcagctcactgcatcctccacctcccaggttcaagggattctcgtgcctcagcctccctggtagctgggattataggtgtgtgtcaccatgcccggctagttttgtatttaaaaataggcaggattaaaaagtaggtggggttgatccaaccattatctacatgattgaaccccaccttcagccccttccccttcctggaggtcaggtggctaaaaatcccaaccttggtggttggtgtttctggcatgaccagcccccatcctgagtcacctccttggtataagctcagttatggtccagggcccccatgaataataaagacgcttcttttttttttttatttccataggtttgggggaacatgtatttggttacatgattaaattccttagtggtgattcatgagagtttggtgcacccatctcccaagcagtatacactgcacctaatttgtagtattctatccgtcagctttccaccctttccccttgagcccccaaaatccactgtgtcattcttatgcctttgcatcctcatagcttagctcccacttatgagtgagagtatacaatgtttggttttccattcctgagttccttcacttagaataatggtctccagtcccatccaggttgctgcaaatcccattaattcattccgtttcatggctgagtagtattccattttatatgtatgccacagtttcttcacccattcgttgactgatggaaatttaggtttgttccacgtttttgcacttgcgaattgtgctgctataaacatgtgtgaacaagtatcttttttgtatcatgacttcttttcctctggatagatacccagtagtgggattgctggctcaaatggtagttttacttttagttctttaaggaatctccacgctgttttccatagtggttgtactagtttacattcccaccagcagtgtaaaagtgttccctgtttgccacatccacaccaacatctattattttttgagtctttgattatggccattcttgcaggagtaaggtggtatcacattgtggttttgatttgcatctccctgatcattagtgatgttgagcatttttccatatgtttgttggccattaagacacttctattacttggaaaattccaagagtttagacgccccctgccaggaaccagaggtagtgactagacagattatttagcacacaatatctttctatcttaaaatcgcaatcatatctgcaaagtctctttttgccatataaggtgacattcataggatccagggattaggacttggatatcttttttttttttttttttgagaaggagtttcactcttgttgcccaggttggagtgcaatggcatgatctcaactcactgcaacctccacctcccaggttcaagtgattctcctgtctcagcctcctgagtagctgggattacagacatgcaccaccacacctggctaactttgtatttttagtagagacagagtttcaccatcttggtcaggccggtctcgaactcccgacctcaggtgatccgcccgcctcagcctcccaaactgctgggattacacatgtgagccaccatgcctggccaggacttggatatctttgcaggccatcatgcatcctagctcaaagagtaactagctgagaaagactcccaggtgggggatggaagtcgaaatgcgtacctggtggcctaactgcttgctgagctgggttaagtggcaatttggaagatccacagacagatctagtctaacttactgatgatcaagtggagatctctgactcactgaacagcaacagagacgaactgacaggattgacttccaggctgactgacaacctcaacggcagagcctcttccaggttgtagtgacaaatgtacaatggaagcacaggtggacaggagaagcccaggagtctcttcctgggggtggagctgagtaagtaccggctgtggctggggcagaaggaagaggcccccaggttaagctggaacttccccaggatcctgtccatggctcacgcatgccctcgagcccctggtactccaggcttagatgctggggcagcagggctggagggaacctcagggcaggagcccagagagccaaataactggattcaaagggtccatcctcccttcaccattggcctcaggcatacctgatcaatgcacaggtcccagcttgcagtctcctggctctaactggctggtgttagagcagatccataaagaccccaaataagagagtcaggaccaaattgtcctccctggcccttggccccagcccacccccctgccccactccccaacacacaagagtcaaccttccagggaagaaaggaatccctggagcctatccctcatcctagaacagatattcagtcagcttttatggtcctggaatattggtcttgctagaaagactattctaaatgccaacagctggccgagtgtgatggctcatgcctgtaatcccaacactttggaaagctaaagtcagtggatcacttgagcccaggggctcaagctcagcctgggcaacatagtgagaccctgtcactataaaaatagttttttttgaggtggagtctcgctctgtcgcccaggctggagtgcaatggcgtgatctcggcttactgcaacctctgcctcctgggttcaagcgattctcctgcctcagcctcttgagtagctgggattacaggcacaccccaccacacctggctaatttttgtatttttagtagagacagggtttcaccatgttggtcaggctggtttcgaactcctgacctcaggtgatccacctgtctcagcctcccaaagtgctgggattacaggcatgagccactgtgccaggcctgttaaatgacttttctaaactacttctgtaaagtctatattctctgtcatggctactgaagtctttgctcagttagcttcatggttagctagtggttggacagagatttccttgaatgtctggaatcggaagtctgccagtctttgccagggagctctgtgtacttattagggacacaccttcaacattcacccaggaaatttacaactgtgctttagctctcacttcctgcttacacagagcctcgaagtcggccagcggtgtgagcttagggctgtctcaggtctttcctaagcatgtggccttccatatccccagaaatatgtcagaatttttcaaaagtccctccgaacatctaatgtcttcatttttccttctaagattttttttttttttttttttgagacggagtctcgctctgtggctcaggctggagtgcagtggcgcgatctcggctcactgccagctccgcctcctgggttcacaccattctcctggcttggactacaggcgcccgccaccacacccggctaattttttgtattttcagtagagacggggtttcaccgtgttagccaggatggtctcgatctcctgacctcaagtgatcctcccgcctcgacctcccaaagtgctgggattacaggcgtgaaccaccgcgcctggcgcttttccttctaagatttttagttaggctattatttccccaactgttaagtattgccacaggcagctgcaatgttaaaacatttaacaaatagcccctggggagaaatgtttagcatccggcaagttcaagtgaggtcaggtctttcagagcagggtcttccagagtaccaataaataggtcaataaatgactcttcttggctgggtgcggcggctcacgcttgtaatcccggcactttgggaggccgaggtgggtggatcacttgaggtaagcagtttgagactagcctggtcaacatggtgaaaccctgtccctgctgaaaacacaaaaatgagtcaggcatggtggcgggcacctgtaatcgcagctactccggaggctgaggcaggagaatcgcttgaacccaggagaaggaggttgcagtgagccgagatcacgccactgcactccagcctgggcgacagagcgagactctgtctcaaacacacacacacacacacacacacacacacacacacacacacacacacacctcttcttgaatgatcctgaatgaggttttgaaggagccgcacctctgttcttttccgtatggtatcaagattgtgggctgttatttttcaaggctaccctctgagctggagagccaggaataagactagagtgagttaaaattctacagagcttgctgtttttttatgtgtttttttttttaattaaatgctctgcaaattactgtaagcttttggttaatttccagagttgtgaaaatgttgattctgtcaaattttgccagtttttttcattgcttttgtagaaaggcaaattttactctgccattttgctgacgttcttttttttccccttcgatgcttaaattatctttaatttggccagtgaaagcttttctctctggcttctgggtccttttgacatattcctattggttttttgctgatcgttttttcttccttcctggcctaactagatgttctaggcttttgtcccccccaaccctgcctcagcctcccaagtaactaggactacaggagcacgccaccacgcctggctaatttttaaattttttgtagaaatgggtcttgctatgttgcccaggctgctctcatttttccaaaaagccctgggctaggtggagattggcagttagaaatgatctgggtgttaagtgtgcccattgttactggggtatgtggctcccaggtcctcttagtagataaatgggaacacacacacacacacacacacacacacacacacacaaacttatttctatatttatctttatattttgaaaaccatgaattcacctcagtacctccaattcaatagggtttattcttgtttttttttgtatcttttcttttttttttttcttgagaccgagtctcgctttgtcacctgggctggagtgcagtggcgcaatctttggcagtctcagctcactgcagcctcaacctgctgggcttgagggattctcctgcctcaggctcctgagcagctgggaccacaggctcacggcaccacacccagctaattttttgtctgtaaagacagggtctcactatgtttcctgggctggtctggaactcctggactcaagcgatcctcccaccttggcctcccaacgtgctgggattacagtggccgggtgcagcggctcacgcctgtaatcccagcacattgggaggccgaggcaggtggatcacccgaggtcaggagttcgagaccagcctggccaacatggcaaaatcccatctctactaaaaatacaaaaattagccgggcttggtggcgggagcccgtaatcccagctacttgggagcctgaggcagcagaatcgcttgaacctgggaggtggagtttgcagtgagccgagatcttgccactgcacccagcctgggtgacagagcaagactctgtctcaaaacaaaacaaacagaaaaacaaagtgctgggatcacaggcataagccaccacacctggcctctgcatctcatgagcatttattttgtgctatgtgttttttggatatgacctcaaagaatccggtaacacagccgccctcattctcattttacctatgagcatagtggctcagagatgagtcacctgcccacagcccatcagctgataaacactggagttgggtttgaaactgtgaaagcaatgaggaccacatcattttcacttcccttcgtggccccaactcaaaccaacccaaaacccaagaaagaagatgtggagattgtgttgcctttcataactgggaagcgcgggtgagtggaggggaccagattcaggatctgcttttctttctttctttttttttttttttttttttgagacggagtcttgctctatcgcccagtggagtgcagtagcgcgatctcggctcactgcaacctccacctcccgggttcacaccattctcctgcctcagcctcccgagtagctggggctacaggtgcctgccaccacgcccggctgattttagcatctgcctttctttatctgtctatgatctgtttgctccagaatgtaaccttctagaccaaaggttggcaaacatttgaaaagggccaaatagtaaatatttttgggcctcgagggctctctgctgcaactctgctattctagcacaaatgcgtcacatacaatacataaatgcatgggcagaaaacaatttgttagccgggcacagtggctcacgtctgtaatcccagcactttgggaggccaaaacagattagggttttccaaggctgcaggaaggcaggaatgtggagtgactgcttagtaagtatggggggctgggcatggtggctcacgtctgtaatcccagtaccttgggaggccaggggaggaagattacttgaggccaggagtctgagaccagcctaggcaacatagcaaggccccatctctacaaaacatttgaaaattagctgaccacggtggcacatgcccacgtccccagctactcaggaggcagaggtgggaagattgcttgagcccaggaggctgaggctgcactcaaccatgattgtgccactgcagtcaccctgggtgacagaagaagaccctctctcaacaaaaacaaaaataaataaataggccgggcgcagtggctcatgcctgtaatcccagcactttgggaggccgaggcgggtggatcatgaggtcaggagatcaagaccttcctggctaacacggtgaaaccccgtctctaccaaaaatacaaaaaattagccaggcatggtggcaggcacctgtagtcccagctactcaggaggctgaggcaggagaatggcatgaacccgggaggcggagcttgcagtgagccgagattgcaccactgccctccagcctgggcgacagagtgagactccgtctcaaaataaataaataaataaataaataaataaataaataaataaataactatggggtgtccttttggggagatgagaatgttctggaactaggtagtagggatggttgcacaacattgtaaatgtactaaatgtcactgaattgtatactttaaatggtatgctttaaatggtaaagtttatgttatgtgtattttactacaatagaggaaatgaagggaatccttcaggatgaaatgaaagaacactagacagtaactcaaatccatatgaaaggccaggcgtgatgactcttgcctgtaatcccagcactttgagaggccaaggcccacctgaggtcaggagcttgagaccagcctggctaaacatgatgaaaccccgtctctaccaaaaaatacaaaattagctgggtgtggtgtcgtgtgcctgtagtcccagctacttgggaggctgaggtaggagaatcacttgaaccccgttgacgtgagctgagatcacaccactgccctccagtctgggcgacaaagtgagaccctgtctcaaaaaaaaaaaaagtccacatgaagaaataaagaaccccttcccaccactggcattttccgcaactgcctcccatataaattcctcttgtcctcaaatttgggtctgcttagtgtactgattaagcatggacttgtgtcaacttgcctaggttcgaatcccagccctaccacttacaagctgtatgaccatggtcaattgttaacctctctgtgtctcaattttctcctctgtaaagcaggataataactgtgcttttcttgtagtgttattgtgaagactgttagtgtctccctcacccacccagtcaaaaaacaccagaatcacacatgtggttgaacaaatgtctttgcctcccctcccctcccctcccatcctctcccctcccctctcttttcctttttctttgagacggagtctcgctctgttgcccaggctggagtgcagtggtgcaatccggctcactgcaacctccacctgccaggttcaagcaattctcctgcctcagcctcctgagtagctgggactacagatgcgtgccaccatgcccggctagtttttgtatttttagtaaaaacagcgtttcaccatgttggccaggctggtcttgaactcctgacctcaagtgatatgcctgcctcggcctcccaaagtgctggaattacaggcatgagccaccatgcccagccagttgaaaaaatttcaatgtattacttgtcacagcgaaggagaatacacaccacgggtagctgttactgaaacaccagttcagtcggctgcttgccacacagaaagccaatcactgagacactagtattgcccatgaagaaggctttaattaggtgccaaccaaggagatgggagatcagtctcagatctatctccctgactgattgaaattaggagtttaggctggacgtggtgacttacgcctgtaatcccagcactttgagaggccgaggcaggcggatcacctgaggtcgggagttcgagaccagcctgaccaacatggagaaaccccatctctactaagaatacaaaattagcctaggggtggtggcacatgcctgtaatcccaactactcaggaggctgaggcaggagaattgcttgaacctgggaggcagaggttgcgatgagctgatgtcgtgccattacactccagcctgggcaacaagagcgaaactccatctcaaaaataaattagttaattaaaaattaggggtttatatagcagggaagaaatgtgacaatatgtgagaaaacaacagttaggtaggggtaaggaagagaagttggtcaacaggaagcagatcgtcaattgggcaatcatgatgggtgaggggtctgacatctcattgtccaggtgtgatctgctaagtttcagctccttgatactatctgggagtcctgatggttcgtttcctgggaaaggaactcagataagacaaatgtaactttctcaagtcaattctatgtttattgaaagaaactattaatataagttctatgggatgatggggctagtttcataaccatggggtatctcagtaggagagtgtaataaatgacttattatatgattggggcttgtgttaagttctttaggggaggattctaggttggatgctatcaggaagagggggtaatcttatgactaggcattctaataagtcttttaatttaattttttttttgagacagagtcttgctctcttgccgaggatggagttcagtgaggcaatctcagctcatggcaacctcctccccccaagtagctgggattacaggctcctgccaccacggccaggtaattttttgtatttttgtagagacagggtttcaccatgttggccaggctggtctcaaactcctgaccttaagtgatccacccacctcggccttctgaagtgctgggattacacgcatgagccactgaagaacaaataaatcttatatgcaaggagtaaagactagactgaggctaaagccatgattgataaaagagagtgctatgagctgagtgtttacctctgaaattcatatgttgaaatcctaacccctaagatgatgttattaggaggtggtaatttggggttagtaattaggtcatgaggtcagagccttcattagtgtcctcataaaagaaaccctagaaagcttccttcaccctttccaccatgtgagaacacagcaagaaggcaccatctatgaatcaggaagcaggctctcaccagccaccaaatgtaccagcaccttgatagctggaagtgctgggcaaagttctagcaatgctatgatcagctgcaggaccagaccagctcctagaacaccatggtcacctaggaaggccagggcagctcctaacaacaccaaagccagctgtgagcttcaggcctgctcttgaccactcttcttctctcgggattaaactagctatgttatgtagagcatgtagaacaatgtctgataaatcttttatcgagacttgctctttctagcctccagaagtgtgagcaataaatttctactgtttataatccacccagcctatgatgttttattagagcagccccaacagactaagagagaaaggttgttccaattagccagaatataggaatgtttggttatgtctggtttggacagtgctcacattttgtctgtgttcagacatgcttacagagtgatctcacttttgtcttgctatgtacacatttacagctacaaacgtttttgcttgatgttgatgttctgtgaaattgtttatattcaagaggacaacatcataacctaggtggaagtgctgggtaaagttctagccatgccatgatcagctggaagaccagaccagctcctagaacactctggccacctaggaagcccagggcagctcctagcaacaccaaagccagctgtgagcttcaggcctgctcttgaccactcttctcctctcaggattaaactagctatgttatgtagagcatgtagaacaatgtctgataaatcttttttcgagatggagtctcactcactctatcacccaggctgtttgctcactgcaacctctgactcctgggttcaagcaattctcctgcctcagcctccccagtagctgagattacaggcatgcatcaccatgcccagatagtttttgtattttttatttttttaatgttttagcaaactttgttgtacagaacaaaaaaaaatacatcatgattctgcatgattttctctcccacaaaagcatgggtgaaaaccagtaacttacttataaaaatattttatttaggactctaataagataatatgtacattcataccttgtctcctgagtatttaaatggggaaaggttcacctgaaaaaagttttccccaggaaacccatagtttcttggctcaactgacccattaaaaaagtccacctagagccaggtgcggtggctcacacctgtaatcccagcactttgggaggccaaggcgggcagatcacgaggtcaagagattaagaccatcctggccaacatggtgaaaccccgtctctactaaaaatacaaaaattagctgggcgtggtggcataaacctgtagccccagctaatcaggaggctgaggcagaagaatcgcttgaacccaggaagtggagattgtagtgagccaaaatcatgccactgcactccagcctggtggcagagcaagactgtctcaaaaaaaaaaaaaaaaaaaaaaaaaaaaaaagtccacctaggcggggctcagtggctcatgcctgtaatcccaacactttggaaggccaaggcaggtggatcacctgaggtcaggagttcaagaccagcctggccaacatggtgaaaccccatttctactaaaaatgcaacatttagccaggcatggtggcacacacctgtaatcccagctactcaggaggcagagacaggagaattgcttgaacccggaggcagaggttgcagtgagccgagatcaaaccattgcacttcagcctgggcgacaagagcaaaactctgtctcaaaaaaaaaaaaaaaaaaaaaaaaaaaaatccacctgtatcaactttctgccagtctggagaagatttgttttctttgatctgacatcatgtgttcacaagcttccaaaatgtttgccaaaattaaagtttgatggatggtttttgttttgacccatattcttccattcattccaaatactatctccagggaataaagttttcccacttcctgtatgattccacaacctggagttaatagctttctaactaagcccaaagtcactttaaaaagcagaccatcagggccaggcacggtggctcacgcctgtaatcccagcactttgggaggcagaggcacgcagatcatctgaggtcgggagttcgagaccagcctgaccaacatggagaaaccccgtctctactaaaaatacaaaattagctgggtgcagtggcgcatgcctgtaatcccagttactcaggaggctgaggcaagataattgcttgaatctgggaggcggaggttgcggtgagccaagatcacaccattgcactccagcctgggcaacaagagcaaaacttcatctcaaaaaaaaaaaaaaaaaaaagcagaccatcctgtccaatgacacccattccattggctcgtcctcagctgtcaatacacaccatctctagttccatgtctttattagcaaccacaaagtggccatagatgagatctccaacctacacatatggtctgtttcttttagttgcaccttcaaacgccaagtaaaacaaagaagctggctcactccctccaacatcagctctgaatgtatctccagatttagctgtcactatgccaatcacatggtctcctttcactcgaacatactcattcccggggctgcagcacttccaacccggcggtgtctcagctttcccagtcctcgttcttgtgttttttagtagagacagggtttcaccattttggccagtctggtctcgaactcctgacttcaagtggtctgcccacctcagcctcccaaagtgctgggattacaggcatgagccaccgggcccagcgtgataaatcttaagtgctgtaattactgagtatccatcattcaaataggcaatttatacctattactagtgcactgtattaaaactcatagtaacatggccaggcatggtggctcacacctgtaatcccagcactgtgggaggccaaaacaggtggacccacctgaggtcaggagttcaaggccatcctggtcaacatggtgagaccccgtctctactaaaaatacaagaattagccaggcatagtggtgcgtgcctttaatcccagctactctggaggctgaggcaggagaatcacttgaacccgagaggcagatgttgccgtgagctgagatcacaccactgcactccagcctgggagacagagcgagactccatctcaataaataaacaaataataaaaaataaataaaactcacaataacagtgtgaggcagtgtagttgtctcatttcacagctgaggaaactgagactcccaaaaagtgaggctcaaggtgtcagcgttgtatatgggttcagatagagtcttttggcactggaatttactggatagtttctgcctgccctctaaatgactctcctctgtgtcaggtgcttcatctctcaccccacttttcaggaagggtgtgtctccatcctgttccttattcttcttcctggcttggagagatgtgattctgaggggctgcaatgcatggggttataaaaacccacagtccagagaggggatggagagagaagggagtagagaggagaagatggaggaagtgtgcgagcccaaggggccaggcaaccctggtgaggctgccccaccccttccgtgggatgttggtagtgaaacagaaaaggttcccttgtcccccttgcagggcgtgtgacggggggtgtggctcacatcttctgtgccccgctgctcaaacctccaggggaagcatgcagacaggcaggttgtggggctccaaccccatggcagcgtctaggggtgaatgctttacagctcatgagggccccgtgggaatgtgttacagcgtgctctttcagttttgccgtccgcaattggctgatgttcatcagctcagttagatgctctgccttattgcaaggacagacgactttctctctcccagggttcttgccttagtgaactggaaaaattggatcccatgtgatccaattgggtgatccgattggagggtgggtgaaagtttttttatggagtggtggtagccctcagtgaggtgcttttctgtttcactgtcaacatcccacagaaggggtggggcagcctcaccagggttgcctggccccttgggctcacacacttcctccatcttctgaacccatatacaacgctgggagtggtggctgtagtcccagctacttgggaggctgaggtgggaggatcacttgagcccaagagtttgaggctgcagtgagctatgatcacaccactgcactccagcctgggtgacaaagtgagacctcggtctctacaaaaggaaagaaataaaagaaaaagggctgtctagcaaagacatggaatcaacccatcaatgatagactggataaagaaaatgtggtacatatatacaatggagtactatgcagccataaaaaagaacaagatcatgtcctttgcagggacatggataaagctggaggccattatccttagcaaactgatgcaggaacagaaaaccaaataccgcatgttctcacttataagtgggagttaaatgatgagaacacatggacacataacggggaacaacacacactggggcctattgcagggtggagagtgaggagggagaggatcaggaaaagtaactaataatctgtacatgtcatatgttcacctgtataacaaatctgcacatcccacacatatacccctgaacttaaagtttaaaaaaaatcacatcattactctttaaaaaaaaaaaaagaaagaaagaaagaaaaagaaaaagggttgtcacttctgccttcatctgctccctctaaccctctgatggctgccccacctgccaccactttcctgaaatgaccaaggagagtaactaccgttcctttgtgaaagccaaccagacttgtttctatcttgtttccactcattaatggggtggccactccctccctcctccttgaaactcctctctcccaagacttccctgatggcctcacctcctggttctcctcctgtctgcctgaccgctccttctccatctccttcatgggctcctcttctgcctgccctcaaaatgtccctgtcatttacaagtctttactatccaaattcactcctgctactgggaaggcaagaaggaaagacagtcacagctggactgtctttcaagtttctccagagctggagccagtgaggttacactgggtagcaaagtcagaggaaggagccaaggcaggaactaagtgagaaaccaaccaagttccaatcagccaagagtgaaagtccaaactggttgtagaaactaaatggccatggctgggtgcagcggctcatgcctgtaatcccagcactttgggaggccaaggcgagtggatctcttgagtttaggagtttgagaccagcctggggaacatggtgaaacctcatctctactaaaaatacaaaaattagctaggcatggtggtgcatgcctgtagttccagctactcaggaggctgaggtggaaggatggcttgagcctgggaggtggaggttgcagcaagctaagattgtgccactgtactccagcctgtgtgacaccatgaggccctgtctcaaaaaaaaaagaaaaaagaaagaaactaaatggccacaaggtagggtatggagacaaccagggtgagcccataaaactatctgggcctggtgcctttcttcttattagatctctaattaccttcttttcagctgttttcaaattgccaaagcatccacaaagttgccagatctagtcagcctgcaagctgaccacagatgggctcctataatatctaatctgttcaggtttcctatttcagatgatttgtatcactctgtgattaatttccaaattattactatgtttgtttcaactccgcctccccccaccccacacctaatagttattgattgccacaaacaaattgccacaaatggcccagcttaaacaacatacatttattattttatagtttttatgggtcaggaatctgggcatgacttgcctggatcctttgcctggggtctctcataagacggcaatcaaggagatggccaggattaaggtttcatctgaaggctcaactggggaaggattcacttcctagctcactcatgtgactgttggcagaatcagttccttttgtgctgttgggcaaattatctcagttcctagctggctgttggccagaggacaccctcagcttattgccacatgggtttctccaacatagcaacttgcttcatcaaagccatcaaggggaaaagtctgctagcaagatagaagtcagaatattttggaatataatctcagaagtgacagtttctcaatgatgaagtattctattggttagaagcaagataatcaccagtagaggatcacagaaggccatgaatactaggaggtggggaccatttcagaagctacttactacaccccaccagcatataaatatataagtctattagagcaggaacactttggttcatgttaaccatcacttctccagtgttttaatgagtgaatggaggctgggcatagtggctcacacctgtaatcccagcactttgggaggctgaggcaggtggatcacctgaggtcaggagttcaagaccagcctgggcaacatggtgaaaccctgtctctattaaaaatacaaaaattagccagacatggtggcgtgcacctgtaatcccagctactcaggaggctgagacacaagaatcacttgaacctaggaggcagaggttgcagtgagctgagatcatgccattacactccagcctgtgtgacagagtgagactctgtctcaaaaaacaaactgaaaaaagagtgaatggcatatagtaggtgataaattaatattggtgaaatgaaagattcaatggggtaagctatgtggtcttagagtggaatagctagagattgcttcaattcaacaattttttattacgttcaggaattctattcacagaatagtcaaggagcagtggatgggtgtaattgtcatgacaggtaaaaccaggggtgataaactgtggggtgaacacagacatagaagagtcactggataaatctgctggcttgcatcactgtgtaggggtcctggatgtggtcggccaatattaggcttagtgagtatgcttgtaggcatacacctacaaggatgtatcagttcgctattgctgcataacaaaatgctcccaaaattaatggcttgggctaataatttatttggtacatgattgtgtggttcaccaatttgggtcagattcagctggaaagttcttctgggtatagctgggctcatttatgcatctgtggtcagctgatggattggctaaatctggctactcttgaatgctttggcaacttgaaaatgtagctgaaaatactttaacaaagctcttcttgagaggcaaactcactatcccctccccttgaatctgagcaggcttggattgcttcaaccaatagagtagagcagaagtgatattatataacctccaaggctagatcataacacatcatgcaagcttctgtcttgtttgcaggaagattcacttccagagccttgagacaacatgtaaaaagttcaactaccctgagactgcagtgatggagatgtcatgtggagagaccacatggaaagtccctgaagctacaggaggagagcgagagagagagagaaagagatcgatcccccaagagacttcaatcatttgagtcatcccagcccaggaaccagacatgtgaatgaagaagctaccagataatcccagccaccagataccagctcccagccactggaggcactcccccactcttcaagtctccccaccttaagccctagatgtcatggatcagagacaaaccatccccactatgccctgtccaaacttcagacccacaaaaaccatgagcatattaaaaatgattgctgttttatgccactgagttctcggatggtttcttacacagcaatcgaaaactggaacacggctgggtgcagtggctcatgactgtaatcccggcactttgggaggctgagacaggtggatcacctgaggtcaggagttcaagaccagcctggccaacatggtgaaaccccatctctactaaaaaaaatacaaaaaattagccaggcgtggtggcgtgagcctgtaatcccagctacttgggaggctgaggcagcagaattgcttgaacccgggaggcagagatggcattgagccaagaccacaccattgcactctagcctgggcaatgagacagaagctgcatctcaaaaaaaaaaaagaaagaaagaaagaaaaaagaaaagaagaaaggaaactggaacagataacctcactcacagctggaggttggtcggctgacagtttaggccatgagggtgactgagccatgtgcctctcacctttcaggctacctctggcttgttcacatgatggttaagagtggcaagatcagtgcaaaatgacaaagtagacagttccaagcccgcgttccccacagaaacatcaaaaaacaagcagaaactgtcagatacaactttgtcagaactctgggaaacagtcaaaggtttacggtagtccagtgaatgctgaatcaagaagaaagacaacttcaaaatgatcaaaagcttttgatatttcgacttgcgtttgccccacttgccactgccctcccttgtgtgacagcagtagtgggaagagggaagcccacactcccagcatgagactctcattcctccttccagagggagcagagcagactttatttgtagatgatagtgtatgtccgctctaagctgtctgggagccacctgaaggacaaggtgctcatctctggtcttcctgcctcggaactcaggctggaaaagtggtggcactgctcaaaaacactgcaagccaaactaacaaaccacagatgtctgttccaaagattacaatcaaaacacacaatagacggcctaaggctcaggagcaaaagctggggagagtttcctggggaaattagaagcacctgcatgcatagggggatttataaacacagggttatgcccacagcaagatgcatgctcagaaaagacctgagaagaccctaagttatgctcagctgatccctaggctcagggcaagctgggttaaatgttgaaagagtgctccagcacagggccaatctgcaaagactgagcgagggaaagattttttgtttggttggtttgcttgcttttttagctcctggtattcaagaaaatctgtcaaaacactagctgaacacaagctaaggaatagagacttcagtgaccacatgcgacaagtaatatagtctttgcaagaatagttttggaaagtcattaagccaaaactactacggtctttaacaataaaacaaacaacaaaccagcaaaccctgggacagtgggagaatctgacatccaaatttatcacattacaaatattcaaatgtccagtttttaacaagaaaaatcacaaggtatacagagaaaaaggaaattatggcccattgaaaggggaaaaaaaataacaaattgaaaggaattattcctgagaaagtccagatctgagacttactagacaaagactttaaaataattgtcttaaatatgctcaaagagctaagggaaaacatggacaaaaatctaaaggaaaccaggaaaacaatgtatgaataaaatgagactatcaataaagaaatggccaggcgtggtggctcatgcctataatcccagcaccttaggaggctgagttgggtggatcacttgaggtcaggagttcgagaccagcctggccaacgtggggaaacctcatctctactgaaaatataaaaattagctggtcattgtggcaggcacctgtaatcccagctactcaggaggctgagagaggagaatcacttgaacacaagaggcggaggctgcagtgagctgagattgcgctactgcactccagcctgagtgacagagtgagatcctgtctcaaaaaaaaagaaaaagaaaaaaaagtatgaaggccagaagacagtgtgatgacatacttaaattgctgaaagaaaaaaaatcaaccaataattcaacatctttcaaaactctttcaggccaggcgcattggctcacacctgcaatcccagcactttgggaggccaaggcgggaggatgacctgaggtcaggagttcgagaccaacctgaccaacgtggagaaaccccatctctactaaaaatacaaaaactagctgggcatggtggcacacgcctgcaatcccagctactcgagaggctgaggcaggagaatcacttgaacccaggaggcaaaggttgcagtgagccaagatcgcaccactaaactccagcctgagcatcaaagtgagactctgtctcaaaaaaaaaaaaaaaaaaaaaaaagcagagtttggcagaataattttatttttttatttttttttttttgagacagagtttccctctttttgcccaggctgaagtgcaatggtgtgatgtcagctcactgcaacctccgcctcccggattcaagcgattctcctgcctcagcctcacaagtagctgggattacaggcacctgccaccatgcctggataattttttgtacttttagtagagacggggtttcaccatgttggccaggatggtcacgatctcttgacctcgtgatccacccacctcggcctcccaaagtgctgggattacaggaatgagccactgcgcgcggcctagattggcagaataattttttaaaacatgatctatgtctttttttttttttttttttcgagagggagtttcactcttattgcccaggctgcagtgcaatggagcgatctcggttcactgtaacctctgactcctgggttcaagagattctcctgcctcagcctcccgagtacctgggattacaggcacccaccaccatgcccagctaagtttttatatttttagtagaggcggggtttcatcatgttggtcagggtggtctcgaactcctgacctcaggtgatccgcctgcctcggcctcccaaagtgctgggattacaggcatgagccaccacgcccagcctaaacatgatctatgtcttgtctacaagagactcactttagatgcaaagatacaaacagattgaaagtgaaatgatgaaaaagatatttcatgtggccgggatttatatataaatttaaatatatatatataatttaaatatatatataatttaaatatatatttaaatttaatatatattaaatttaatatatattaatttaaatatattatatttatatatatattaaatttaatatatatatttaaattagcgaggcatgatggtgcacacctatggtcccagctactcgggaggctgaagtgagaggactgcttgagcccaggaggacaaggctgcagtgagccatgattgcatcatgcattccaggctaggtaacagagcaaggctctgtctcaaaaaaaaagaaaggaaagaaggaaggaaggaagggagggaaagagagaaagagggaggcagagaaagagagagaaaaagagaaagagagagagagaaagagaaaaaagggaaaggaaggggaggggagggggatggagggggaggggtggagggaggggagggggatggaggggggaggggggagggaggggaggggatggagggggagggggaggggagggagaaaagggaaaggaaggggaggggaggggaggagggaggggaggggaggagggaggggagcggaggagggaggggaggggaggaaaagggagaaaagacaacacaccaaaacttatgagatgcagcaaaaacagcactgaggctgaggcaggagaatcacttgaaccccggaggcagaggctgcagagagccaagatcgcaccactgcactccagcctgggcaacaagagtgaaactccatctgagaaaaaaaaaaaaaagaaagccttccaacaaagaaaagcccacgaccagatggtgaattctaccaaacatttaaagaattaacactaatccttctcaaactcttccaaaaaattgaagagaaggaacacttccaaactcatcctacgaggccagcattatcctgttaccaaagccagatacagacacacacacacaaaaaaaaacccctacagatcaatatccctgatgaatattgatgcaaaaatcctcaacaaaaccgtagcaaaggctgagcgcggtgactcaagcctgtaatcccagcactttgggagccacgtgcaggatgattgcctgaacccaggagttccagaccagactgggcaacacagcaagacccccatctctaaaaataaaataaaggacaggagtgatggctcacgcctgttatctcaaaactttgggaggctgaggcaggcagatcacttgatgtcaggagtttgagaccagcctcaacaacatggtgaaacctcgtctctactaaaaatacaaaacttagccaggcatggtggcacatgcctgtaatccaagctactcaagaggctgaggcaggagaattgcttgaacctgggaggtgggggttgcagtgagccaagatcgcctcactacactccagcctgggaaacagagtgagactctgtctcaaaaaataaattaaaaataaaattacaaaaaaaaaaaggagactttttttttctttggattacaggcgtgtgccaccacacacagctaattttttgtatttttagtagagatggggtttcaccgtgttagccaggatggtctccatctcctgatctcatgatccgcccatctcagcctcccaaagtgctggaattataggcatgagccaccacgtccggcctttctctttttttttttttttattagacagagtctcactcacccaggctggagtgcagtagcatgatcatggcttgccagagcctcaaactcctgggctcatgcaatcctcccacctcagcctcctgagtagctgagaccacacgtgcacattcagaagactacttcaacatagtaaggactgtatatggggaccaggtgcgaaggcttacccctgtaatcccagcactttgggaggctgaggcaggcagatcacctgagatcaggagttcgagactagcctgaccaacatggagaaaccccgtcctactaaaaatacaaaattagctgggcgtggtggcaggcgcctgtaatcccagctactcagaaggctgaggcaggacccaggaggagaggttgcagtgagccgagatcgtgccattgcactccagcctgggcaacaagagcgaaactccgtctcaaaaaagaaagaaaaataaaaagcaaaacagtctttaataaaaacaaagtcaggccgggcatggtgtaatccgcttgtaatcccagcactttgggaggctgaggctggcagatcacctgaggtcaggagctcgagaccagcctgggtaacatggtgaaaccctgtctctattaaaaatacaaaaattttgctgggcacggtggctcacgcctgtaatcccagcattttgggaggccgaggcaggtggatcacgcgttcaagagatcgagaccatcctggccaacatggtgaaaccccatctctactaaaaatacagaaattagctgggcgtggtggtggcgcacacctgtagtcccaaatactcgggaggctgaggcaggagaatcacttgaacccgggaggcggaggttgcaatgagtggagatcatgtcactgcactccagcctggtgacagaacaagactctgtctcacaaaaaaaaaaaaaaaaaaattagctgggtgtgttggtgggcgcctgtaatcccagctactcaggaggctgaggcaggaggatctcctgagcctgggagatcgaggctgcagtgagctgtaatagcaccactgcactccagcctgggtgacaaaacgagacacttttttttcgagaaaaaaaaaagtcttggagaagatgtgaagaaactggaactcccgttaatcggtaggaatgtaaaatggtgtggctactgcagaaaacaggctggtggttcctcaaaaagctaaacatagggccaggcatggtggctcatacctgtaatcccagcactttgggaggacaggcagtggatcacccgaggtcaggagttctagaccagcctggccaacatggtgaaaccccgtctctactaaaaatacaaaaattagccgggcatgatgacaggtgcctgtaatcccagctactcagggggccgaggcaggagaatcgcttgaacccaggaggcagaggttgcagtgagctgagattgtgccatcacactccagcctgggggacaagaacgagacttcgtctcaaaaaaaaaccaaaaagctaaacatagaattatcatatgatccagcaattccactttagatatctacccaaaagaactgaaaacagaaatgcaaacagatatctgtgtgtgcccaggttcatagaggcattgttcacaataacgaatggtggaaactactccacttatccatctacagatgaatgaatgaaccaaacgtggtttatacatatgatagaatattattcagctataagaaggagggaaattctggccaggcgtggtggctcatgcctgtaatcccagcactttgggaggccgagacgggcggaccacaaggtcaggagatcgagaccatcctggctaacacggtgaaactccgtctctactaaaaataaaaaaaaattagctaggcgtggtggcgggcgcctgtagtcccagctactccggagggtgaggcaggagaatggagtgaacacggcaggcagagcttgcagtgaaccgagatcatgccactgcacccagcatgggtgacagagcgagactccgtctcaaaaacgaaaacaaactaagaaggagggaaattctgacatgtgctacaacatggatgaaacttgaagacaatatgctcagtgaaataagccagggccgggcgtagtggctcacgcctgtaatcccagctagtcgggaggctgaggcaggagagtcgcttgaacccaggaggaggaggttgcagagagctgagatcacgacactgcactccagcctgcacagcagattccatctcaaaaagaaaaaaaaaaaaaagttagccaggagcagtggctcacgcctgtaatcccagcactttgggatgctgaggtgggtggatcacctgaggtcgggagttcaagaccagcctgaccaatgtgatgaaaccccatctctactaaaaatacaaaaattagccaggtgtggtggcatgcgcctataatcccagctactctggagggtgagacaggagaatcgcttgaacccgggaggcggaagttgcagtgagccaagatgcaccattgcactccagcctgggcaacaataatgaaactccatctcaaaaaaaaaaaaaaagtttaactcagaaaaaaaaatgatcataaaatttgttattaatctggctaaaccctggcagaagagtcttttaataaacttccatgcgcaaagtttgattccaaagaaatgacactcatcctaagaaaacttcacaatggtaaaatcaacagttcataaaaactgtatgaaaacagcctgatttgtgcatcaaatgtttactgtaaggaacaccccgaaaaatgttcctgataaaaatgaattctatcaaaaaaaaactttggaaacagtttcactgcactgtatagaaaagggatccaggaatttgactggcttaatgcggtgtttgatggaaaagtcttttccaacagaaatgtgttggatttatttttttcccactgcgcttataaaaatggaatcaaagtgtcctgggaatgaaaccattttttgtgtgaaaatggtagtgcaaagagggggtcaaatgttctgttcatttgccttaggcttggttttatcccccagacaccagctgttgagtgtctcctaggcatggtcccagaaaaataactggtcacgacctcttcctagggaggttctggaccccaccttggcctgaacctccgcagaccactctgtctcccacattcctgctagtattctaggaccagagaccccaggacttttcttttctttccctttctttcttttctttccttccttcctttcttgcttgcagagtctcgcgccgtcacccaggcaggagcgcagtggtatgatctctgcttaccgcaacctctgcctcccgggttcaagtgattcccgagcttcagcctcctgagtagctgggattataggcgtgcgccaccacacttggctaatttttgtttttgtttttgttttttttgagacggagcctcgctctgtcgccaggctggagtagagtggagcgatctcagctcattttaacctccgcctccaggttcaagcgattctgctgcctcagcctcccaagtagctgggactacaggcacccgcctccatgcccagctaatttttgtatttttagtagagacggggtttcaccatgttggccaggatggtctggatctcttgacctcgtgatctgcccgcctcggcctcccaaagtgctgggattacaggcgtgagccaccgcgcccggaccctggggaggtttattaacagttccagaacgttggcagatgcaaaatagacaggaagagggagggagaggcagagagagctggacagaggccgggaccatacgtggatgtcagtcactgcttgcaaggccacacagagtctcctactacagagaaggttgagctctcagaccttaggaagtcctgacgtgcccctccctgggtccagccttcccttccccattctgaacttaggacatctagctgggcgaggtggctcatgcctgtaatcccagcactttgggaggctgaagtgggagaacctggcaccaggagtttccgactagcctgagcaacataccaagaccccagcctctaccaaaaaaattagccgggcatggtgtgcacgcacctgtagtcccagctactggggaggttgaggcgggaggatcattggagtccaagagttcgaggctgcattgagctatgttcgcatcactgcactgcaaactgggacacagagcgagaccctgtctctgaaaaataaataaataaaaacacacttatgacgtcaccctctctgctatgacaaggtccttccctgccccaccccctccagggcccatccctacatcttggggaggaaataagtccattttggtcagtcttgcccgctgtcagtaactgtccctacgaattcctctctagcttgaaggattctccacctctcccttctctgttaaaagagtcacgggcccattttcattcattcattcatcaaatgtttataagcagtttccatgctggggacctggaagagacccgacctaggccctgcatcccgactccccgaggatctatcagcctgggaggatggggaatgggagggcctatccctccccacgatcacggcgcgaaccgagctttgatggagaaacacgcggctctgtgagctttagagaacacatttaacctggcctggagtaagacaggggacgggcctgaatcttttatgggacccgcccccaatatcaaccgccccgtccccagcacagaactgggctcctagacgacacggtgccatcacgtccccagtgagtcttcaggatttctggccacgccccttctcagacccaacccccgagcccctcccttgcttgaccccgccccatctctggcctaggccacgccctcctcttagccccacccccatttcattcaacccaggcctcaagccccaccgcccaggacgccaatgctcccaccaatctcacatacccattggtcagagagtgtcactttcccgccctccttcagtagcattggttccctaggtgtcaatcttctttatggcgcccccagcagttgccagggcccaggtttgaggggcagataataatggacgtctcggggcgtctcgttattgggcagaaagcccggctctgggcggggcttagtgccaaacgcttggccgcgtctgcctggtgttcctcagggccgcagcctttcctcacggacacacccccactttccttgctattggtcttatcaggtgttgatcaataggattcctcattccgatacgcaaaactacctgtccttcaccgcttccctcatttcaattcgctctctcctcagaggcggcaaccttctgaacgtagccagggcccgcctcacggaatggccacggaatggtcagacaccccgtcactcctggctggtgggcggggccagggcgcctgggggcggcgaattggcggatggggcctcgggggcggggcagcggctcctgtcagcgggtgaaatggcagcggcggagccggcggcggccgcggtcccggggggcggctgagggggccgggccggggctgcggggcgaacggcgcggctaggatccggcggctcagcccggggcggcgaggctcggcacggagatggcggcgcgctcggcgcaggtagggcggcgcgggccgggcctcccgggcgcctgctcaggccggcggctccgtgatgcggcccgcggggaaccggcaggaccgcaactcgggccgtcgtgccccggaacccgcgctgggagcctcggcatccccagcccgggaccttcggaggaccctggcccctgcccaccctcgttgccgatccctccggacccctccccaggagctcctgcaggatccccctcccccactccgtcccctccccatgaggaccccgcaggcccaggacccccgtccaccctttgcagtgaccctcaggactcctctccgggaaccccctcagggctccccatccccccactccgccgatcagcccctcagaagcgccccccaagcccaagaacccccgtccaccttctgccctgatctctcaggacccctcccttctggacaacacttgccaccccctccccgcaccccctcacttcacgtcctcctatcttgggcccagaactgcccccacctctccccaaggagaccagcctcagggcctacccgccccccatgctgaccccacaggacccctctctggcctctgtaagtcggatttcctacccctgcccacagccctcagctcagcctgctagcccatctcccaccccagctgccacatgcccaagggcacccctaaacaccactccccggcgtccacccagcacactgtggtagctccactgatcctgccccatctggatcctggctcctggatcctgaaaaatccacccatgctcaagacctcccgttggatattctgaaccaccccactccccatccagagccacccatctttctgaaaaccccaaacacacacacacacacacacacacacacacacacacacacacacacagtcacttagatcccccagcacacacagaaaaacttaagagctccaacatagaccccaggcatatctgcccctgcccccacccactcaacacttctgcacccctcctcagatcccacctgtccaggccctcccagagtccccgacagctcccccagctcaagcagagattccagagaccatgaggtgcctgccgcaccccaggaagccaacttgcccctccaccaaaccagcgcccacactggagccttggagggtgacagggccccagaatcccccagcacctacccctgtgggaacctgccccaggcctctgccaagttatccatccttccctgctgtgccctttcaaagggaaggacgctcactttctctcctacactagtgtcccgaaggaaccactgcccgccccctgatttatgccaccccctggcgggaagggagaggattcacagctcctggcttccgtcctgaagtctgcccccagcctcctgaccccatcacgcctactggcctcaaatgccagagccagcagggcggtccaggttgctcctcagagctggcccctgacagcccgagagttctttcacccacaactagtgtgtttggccaaaacaaaacagcttccttctatcttggcatttgagacctgggtcggggcctgccagaagcaggcagctctttgttaaggaatattttcagaagggaaaaatgtgctgaagaggctcgagtggaacatgaatgagttgtctgcttcgttttattccccctcggccgggatgtgattgagctagaggacccgtgtccctgtgtctttccgtcttttgtggctcttcccatccatcccgccgccctccccactcccagctctggcctcagggtccaacctgtaggttcctctgggcttctgtggtcagcggagggtggtttggaagggatcgcaggtggcttggccctggcacagggatgagacaagacaggagaggagatgctggcgcgacactgtggccaggactgcagggggcgaggagccgggccggtccagtcccgcgcagcctgggcactgtgcgtctggggtccttctgacaacataactgtgctcagaaaccctgagataaaaggcccaggcttccttgtggatattcactagcggattgtggaccatccaggaaaaagctcattgcggctcagtacctcaacttccccatcggaaactggggtgcggggagagcggctaaatttttagaacagaacttggaactgcaggaaggctagggtgtggccctgtgtgttcccccagtgccgtgtggaaggggacagcaaggtctcggaggggagtcctatgggctcctgtgaatcactggccacccaggtccctgcgagggtcttagttgacacttcattgaaaagtggccatcttcctagggctgagctgtattgcagggagccagctcgaatcagagctggaagaatggagatgagagatggtctgctgcaggacttgtggttatacacagggtcttcccaggaggaccacggggaacagggtgggcatgaggggctgtcggatagccatgctgaggccccacatagatctctgatgccccacatagacctctgacaccgggtaggaagaggtttgttctgtccacttgctgaaggaaggcgtggaggaaaagactcctgaaggtcacgtggtatctctcacgcacaggaaactaaactctacagcctccccagggtggaattttgtgcagagacagtggggtatgaaggcttcccaggatgactgtgaactctataggaaaccacgaggaggacttgtcagtgatacgaacgcagttttacccgagactgggctcgtggagctgcatctttgtttgagctttgagggggcagacggatgaggaggaatgtatatttcaatttcctcttgcagaatagagatgccagttgttacagggaagccctgggcctggagtcagatgttggggtgtgaaggaatgtaagatgtgtacaatgtggtccctgctctgcgtctaaagtcctctcactggcatgcggcggcccccgccatgtgctcagcaccatgccaagcaccattgacatattatctcatttaatcctccccaaaactcggaggaaccaggattgcagcacgcgcccttgccatcctggcctgaggcctgctgcggggagcatgagacagaattatgtacagcaggctgcaatgggagcccggaaaaaaagcctgatgcatccctggggtgttggggaaggcacagcagggatgacgtatggaccaggtcacaggcaggcgtggcagggaagggtgttccaggcagcagaagtgcttggacacacgcccaagaggcaggagcaagcgtggtgcgctcagggaggcgtgtccctgtacttcctttgataggcgtcttactacaagcccttgtgtccccagtgccatctgtacacttggcacacatggtggggggctccccagcaaaggggatccctagttgggagaacttggaaaggcagcaaagccgcccttcccagggaagactgcagcacacacatgctagcagcccgggcaatagaaggaaggaggtgagtttaggagaactaactcagctcatcagggtcagggagaactaactcaattcatcagggttagggaagagacttacccttttgagggagatttggaaggcctcattggcatgactcacctgcactttcattcatttctcagcatgccacgatatgcttgtgagagtgtttgattgaaatctgaggcccggcacggtggctcacgcctgtaatcccggcactttgggaggccgaggcgggtggatcacctgaggtcaggagttcgagaccagcctggccaacatggtgaaaccccgtctctattaaaaatacaaaaaaattagcagggtatggtggtgcacacctgtagccccagctcacttgaacctgggaggcagagcttgcagtgagccaagaacgcgccactgcatgccagcctgggcaacagagcgagactccatctcaaagaaataaatacaaattttaaaaatttttaaaaaaagaaaaatgagggttttgccagaagggaacctattataatagccaaaagtaatctggtcagatgacaagaaagaaaatttttttttaggtcagaaaggattctgcaggtcagaatggttcacttctcagattttagccaaaggtgtgtgctgctgttgctgctattgttatcaataaagattattctagttttactgtgtttactctttaaacaggatcaccacagaaagggagggcctgttgaagaggggaagtttatttatcccacaaatatgggatgcctactagactctgaagatccaatagtgggctagacagccccagcccctgccctagtagaacttttcatccagaagggaataaatatcacaggtcaggcttgtcctaagcacatgacaggtttaagctcattgattccttccaacaaaaactgtggggtagatactgtcattagccctgttttcagataatgaaactgaggcaggccaggtgcagtggctcacgcctataatcccagcactttgagaggccgagtcagggagataacttgaggccaggagtttgagaccaacctgggcaacatagtgagactctctctctgcaataataataataataataacaaaattagctggacatagtggcaagtgtctgtagtcccagctacttgggaggctgaggcaggagaatcacttgagctcaggagttggagcctgcagttggctatgattgtaccactatactgcagcctgggtgacaaaacaagaccctgtctctaaaaataaaataaaaataaaaataaacaaaaaaaattgaggcaaaatacatcatacccaaggttacaaagatagaaagtggtagaggaggccaggagcggtggctcacacctgtaatcccagtactttgggaggctgaggcgggtgcatcacctgaggtcaggagttcgagaccagcttggttaacacagtgaaaccccgtctctactaaaaatacaaaaattagcgaggtataatggcgggcatctgtaatcccagctactcaggaggctgaggcaggagaattgcttgaacccaggaggcaaaggctgcagtgagccaagatcgtgccactgcactccagcctgggtgacagaggtagactcggtttcaaagaaaaaagaataaaaagaaaagaaagaggtagaggaaggatttgaacccaggctgcaagctctgaagttctcacctggagccaagagatctgggataacaacctacattccaaggccagggatatggaaacttccagaaccatgtggaggagcagctagactgggcgcaagaagagatcaggcagggacctctgaattcaagccgctgttcttgttatccaaggggcagctcacctgtcagttgtccgcccacaccttgccaaggacgagaggacctaaggtgctaggttgggccatttccccagaggtcagagccagccaagacagcagcagtctgtcaggctagacaaatcggggtcacatggcatcttgggctttagattccgaaatgagtctgtgtccctggtaatcattagacatggaggaatcagaaatggggggtagggccgggcgtggtggctcacacctgtgatctcggtactttgggaggccgaggcgggaggatcacctgaggttaggagttcaagaccaacctggccaacatggcgataccctgtctctactaaaaatacaaaaattagccagatatggtggcacgcacctgtaatcccagctactcgggaggctgagggaggagaagtgcttgaacccaggaggcggaggttgcagtgagccaagatcgtgcaactgcactccagcctgggctacagagcaagactctgtctcagaaaagaaaaaaagaaggaaatggggggtaggggagtaagggaaacaacatggaaaggaaactcggggtcttcattgctgtctctgaaaatgccacagactgaaagatgcatcatatgtgctcgccctctctcaccgttgaaaaataatgactgttttcactgagtaacccctgcacttggggtttcacatacgtgtatcattcccaaagtaaaagaatacagacagagctgcagcacagcgggtggatttagggcaaaggctatacagtcagaaatccaagttcaaatccttcttcctcctcagcctagtcaagggactctctgtgccatatggcacttgtgtgttaaagccgtcgttggcttttctgcttacactgtacagaaatttctatttttatttttttcatttttttttttagacggagtctctcactctgtcatccaggctggagtgcagtggcgtaatttcagctcaccgcaacctctgcctcctgggttcagcctcaggagtagctgggattatagccatgcgccactacacctagctaattttgtatgtgtgtgtgtatttttaatagagacagggtttcaccatgttggccaggctggtctcgaactcctgacctcaagtgatctgccccccctcagcctcccacagtgctgggattacagacatgagccaccgcacccagcctttattattatttttaaaatagacttgggctgaggcaggaggatcccctgtggccaggagttcaagaccagcctgggcagcagagtgagacccctgtctcaaaaataaaataaaatggccagttgtggtggctcacgcctgtaatcccagcactttgggaggctgaggcgggcggatcacctgaggtcaggagttcaaaaccagcctggccaacatggtgaaaccccatctctactaaaaatacagaaattagccgggcgtggtggtgcgcacctgtaatcccagctacttgggaggctgaggcaggagaatcacttgaacctgggaggtggaggttgcagtgagccgagatcacaccactgcactccagcctgggcaacaggagtgaaactccttctcaaaaaataaaaaataaataaaataaaataagactattttgtagaacactttgagatttatggaacaattgagaagacgatacagagtttccatatgccccatacccagtctcctctatagttaatgtcttccattcatatgatacatttgttgtagttaatgggccagtattgatatattattattaactaaagtccacctttcattcagatttcctttgttttttcccagtaaccttcttccatcccaggatcccacatgacatttagtcgtcatgtctccctaacctcctctgggctgtgacagtttctcagactttccttgcttttcgtgaccttgacgtttttgtttgtttggtttggtttggtttttgttttttgttttttgagatggagtttcgctcttgttgcccagggtggagtgcaattgtggtgcagtctcggctcaccacaacctctgcctcctgggttcaagcgattctcctgcctcagcctcccaagtagctgggattgcaggcatgtgccaccacgcccggctaattttgtatttttagtagagacagggtttctccatgttggttaggctggtctcgaacccctgacctcaggcgatctgcctgcctcagcctcccgaagtgctgggattacaggtgtgagcccccatgcccggccaaccttgacggttttgaggaaggtggagtaggtgttgtgtagaatgtcctctaatactgatctgtctggtgtgtttattttttttttggttggtttttttttgttttgttttgttttgttttttgagacggagtctcgctctgtcacccaggctggagtgcagtcgtgcaatctcggctcactgcaacttccgcctcctgggttcatgccattcccctgcctcagcctcctgagtagctcagattacaggcatgtgccaccacgcccagcaaatttttttgtatctttagtagagacagggtttcatcatgttggccaggctggtctcaaactcctgacctcaagtgatccgccggccttggcctcccaaagtgctgggattacaggtgtcagccaccatgcccagccactctggtgtttctcatggttagactggggtcttggggaggaagaccacaggggtgaagggtcctttctgtcacatcctatcaagggtacgtgttagccacgtaacttatcactgttgatgttgaccttgatcacctgcctaagcgacatggaaagtttcatcttcatttattcaacaaacgtttgtcgagcatgtactgaatgccagatagtgcattaggggcttggaatagagaattaagaagagaggctcttgtcctcaaatcgtgcatgaccctagggcaggcaggcaggcaggtttagaaataattgccatagaatgtgcattgggcttgggtgtaggcagaggggtggatgttttcagggagagagagggggaaaagcgagccaggatgctggaagaagggaggttgacagagaagttttcacagaaagaatggccaaaccggccaggcacagtcccagcactttgaggagccgaggcgggaagattacttgaacccaggaggtcaagtctgcagtgaacagtgagctatgatcataccagtgcactccagcctgggagacagagcaaaaccctgtctctaaaaagaaaaaaaaaaaaatccttggccaggcacggtggctcacgcctgtaatctcagaactttgggaggccaatgcgggcagatcacaaggtcaggagatcaagaccatcctgggtaacacagtgaaaccccatctctactaaaaaatacaaaaaattagccaggcgtggcggtgggtgcctgtagtcccagctactcaggaggctgaggcaggagaatggcgtgaacccaggaggcggagcttgcagtgagccgagatcgcgccactgcactccagcctgggcgacagagcaagactccatccatctaaaaaaaaaaaatccaaaccgggtcttggagaatgcccttccagtcagagggaacagagtatgcacagacactggcagacatcaggagacccatgtgcctggaggactgagtgtgccaagcagggatgcagaaagaggcgaggctgggaagggcatgcacgtcttgcaaagacatctgggctccatctcaccattgggagctgctaaagggtcttaggcaggcaatgacgtggcaagagctgcagttctgtatggttctggtggccccatggacagagcatcagaaaggacagaaagttcaatggacgtggcaggcgccatcaagacagcagctttggtggggcacggtggctcacacctgtgatcccagcactctgggaggctgaggcaggagcatcacttgaagccaggagttcaagagcagcctgggcaacatagtgagaccccaagtctccaaaattagaaaaattggcaaggcatggtggcgaatatctgtggtcccagatactcaggaggctgaggtgggaggatcacttgaggccaggatctcgcaccactgcactccagcctgggaaacagagcaagaccttgtctctaaaagcaacaacaacaacaaaaagacagcagcttccagcctggagagcagaggccagttgggagtgaggtgtgggatgtgggtggtagacttggctgagctctagaacatgagaagggaggaggggaacacccaggcctggccagagtgggtgggtggaggtggcaggtggcaccggggacccagatagatgcacccgcagtaggacaaggggcctgcttctgtcaggaaagcattgaatttgaagagcatctccgcatgaggggccagaagggtctttctaaaatgcaaacctaggccacgggcagtggctcacgcctgtaatcccagcactttgagagacccagacgagtgaatcacttgaggtcaggagttcaagacgagcctggccaacatggcgaaaccctgtctctactaaaaatacaaaattagccaggcatggcggcacatgcctataatcccagctactcgggaggctgaggcaggagaattgcttgaacccgggaggtggaggttgctgtgagccaagatcatgccattgcactccagcctgggcaacaagagcaaaactccatctcaaaaaaaaagaatcaccccaattaaagcttacagtttggtggcatttattccaactgtgttgtgcaaccatcaccactatctaattctggaacatttctatcaccccaaaaagaaacctacacccataagcagtttctccccattcctccctccccctggcccctggtgaccacaaatccactttctgtctctatggattgcctattctggacattccgtataaagggagtcacacagtgtgtggcctttggtgtctggcatctctcactgagcaccttgttttcaaggttcatccatgctgtggcctgtctcggtgcttcactccttttcatggctaagtaatattccactgtctgggtggaccatgttttgttgatccattcacccgttgatggacatgtggattgtttctgctttttggctgttgtgaacaatgctgctgtgaacagatgtttgccgttctcttgcgttgagccctacgagtggatttgccaggtggcgtggtgacagtgtgtttaagtctttgaggaaccgcctgactgttctccatcctaccgtattgtttactgcaagcatttatctcaatctgtgaaggagggtctgggtgattgtttcttggtctctgccccggacactccaagagggcacaggtgattcctgcctctgcgggggaaacacagaacatggaatggtgggtgggctgggggctgatggagctgttctggcaacttgggcaactttggccagttcttgagagaaacgaaaagctggtgacatacatttggtcatttaagccccaagaatgagatccccaagggcatcaagatcaaggccaaggagggacccagggaggaagagatgccacgtgggagaatgagaagtcccggccagagaggcaggaaggaagccaggagcccagtcctcatcagccaggtgggagggggcttagggaaggaggaagcatgcgcggcagtgcccccgagagggaaagccaaacggaagtcgaagatgaccagcattccagcactttccgtccccacgccccccacaacccccaaacacagcccctttccagtgctctggcctggctcagcttcctaagctgtaggtggccctgtggaggtgtggcttgagtgggtgctggcaggggcagggtccaggaccccccttcagatggctgaggagcagttgagggtgaagcattgaaattaaggacacggagaggctgggaccccagacccagaggccagtgggtgggttgccaaggcctgtgcccatccagcatagggagatggagatggggcctcccctgcctcgctccctaccatgtctcctgcctagacagtggccggccctcaggtggccctcagtcagcaccaggaaggagtgattgagccagtgagggtcatggcacagtgggaggggtgcagggtcgcccacagaatcaggacagcagcccacctccaccccaaacctgctctgttcccagggggtgagcgctgctcggtgcaggaagtgtgtgagcgcgtgtgtgtagatgggtgggaatgaatgtgtgtgtgcctgagtgcgggtgcaagagtgtgtgtcaatgggtatgttttgtgttgagaagtgtgaaagagtatgtgtgtatgcctgagtgtgtgaatgtatgtcatgtgcatgtgtatgaggtgtgtactgtgtgtgtgaatgtgcatgggtgtgtgtgttgtgtgtgcatgtatatgtgtgtgtgtgaatatgcataggtgtgtgtgcatcaagtgtgtgcatgtgtacatgtgtatgaatgtgcatgggtatgtatccagtgtgtgcgtgtgtgagaatgtatgaatgtatgtatcaagtgtgtgcatgtgtgtgtgaatgtgtatcaagtgcgtgcatgtgtgtgcatgtctgtgagaatgtgagtgtgtgtgtatcaagtgtgtgcatgtgtgtgcatgtctgtgagaatgtgtgaatgtgtgtgtatcaagtgtgtgcatgtgtgtggggatgtgtgaaagtgtgtgtatcaagtgtgtgcatgtctgtgaattggggtgtatcaagtgtgtgtatgtgtgtgaattgtgtgtgtgcatgtatcaagcatgtgtgaatgtgcatgggtgtgtatcaagtgtgtgcgtgtgtgaaaatatgtgaatgtgggtgtttatgtatcaagtgtgtgcatggatgtgtgtgcaaattgtgtatcaagtgtgtggatgtgcacgagtatgtgtgtattgtgtgcatgtgtgtgaaggtactgggtgtgtgtgtatatgagtgtgcgtgcacaaatatgcataagcatgtgtatatcgagtgtgcacatgtgtgtgtgaaggtatataggtgtgtgtatctgagtgtgtccatgtgtatgtgtgaatgtgcatgggtatgtgtgtattgagtgtgtgcatgtgtgtgtgaaggtaccgggtgtgcgtgtatccgaatgtgtgcatatgtgtaaacgtgtgactatggatgagcacgtgtgttgagtgtgtgcatgtgtgtataggtgtgtgagcgtgtgtgtgagagaataggcatggctgtgtgtcgagtatgtgcatgtgtgtgtataggtgtgtgagtgtgtgagaataggcatgggtgtgtgtgtcatgtgcatgtgtgtgtataggtgtgtgagcgaataggcatgggtgtgtgtgttgagtatgtgcatgtgtgtgtataggggtgtgtgtgtgagaataagcatgggtgtgtgtcgagtgtgtgcatgtgtgtataggtgtgtgtgagaataggcatgggtgtgtgtgtcatgtgtgcatgtgtgtgagagaataggcatgggtgtgttgagtgtgcatgtgtgtgtataggtgtgtgagtgtgagaataggcatgggtgtgtcgagtgtgtgcataggtgtgtgagtgtgagaataggcatgggtgtgtcgagagtgtgtgtgtatgggtgtgtgagtgtgtgtgagaataggcatgggtgtgtcaagtgtgcatgtgtataggtgtatgagtgtgtgtgagaataggcatgggtgtgtcgagtgtgtgcatgtgtgtataggtatgtgagtgtgagaataggcatgggtgtgtgtcaagtgtgtgtgtataggtgtgtgtgaataggcatgagggtgtgtgtcgagtgtgtgcatgtgtgtgtataggtgtatgagtgtgtgtgtgtgagaataggcatgggtgtgtgtatccaagtgtttgcatgtgtatgtgtgagagtttgtatgtgagtgggggtgggtgtgaatgtgtgtacatgcgtgagggagtggggtggctgtgaagagtgtgagagtgcatgtgtgttgtgcgtgcacacacgcttcaggaggatggtttccactgagagagtctggggatgagtggagagaaagttccggtgggatcagaaggttcctgcctctcagactgcaagtttcagccctgtgtatttaatacatttcacttcctgtatgaaatacacacacattcgtgataaatagctgaacaacctctgctggtggacggctcccgggtttgggggatttttaaaatcagaaactgaggctcggctgggcgcggtggctcacatctgtaatcccagcactttgggaggccgaggcagatggattccgaggtcaggagttcgagaccagcctgaccaacatggtgaaaccccgtctctactaaaaatacaaaaattagctgggcgtggtggcacgcacctgtaatcaagcaggagaatcgcgtgaacccgggaggtagaggttgcagtgagccaagattacgccattgcactccagcctgggcaacagagcgagactccgtctcaaaaaaaaaaaaaaaaaaagaaagaaagaaaagaaaccgaggctcgggcagagattgggtggggctgatgccctgagcttgggtttctttggttctgaagctctcactgctccccaactccatctgtggttctgaggctccagcctcacctccaccacctcctccccattctcccagctctgaagctaccctcccagcccctccctgcccagagaggtccttctgatcagcacttcttgtccacagcccccgtctctgtccgggcagactttgactctgtgggaggccccaaagtggcccccactgtccctgcctcgggaatgattaactcctgattaggtggtgcccagcagcttggtctttagggcaggtggccctggcccacttggcaatgagagttccttccactccccaaaatccaaaaccctcagcacccggcagactaggggaacgcttgagggcccaaggtagaaccagtagccttggggagccacagaggcctggagaaagagggttctgggtccccatacagtgaaaaaagaatggcgcacctcccccaaccctattccaggaggactggggtggccagggtcaagtccatccaacctgtaggccctcaggggttggttgggggctgagtttgggctgtgggaaggtgcccagtgacccaacggtagtcaggcaggtatagagtggtctgctatggtcccgccaatgtccccctgctgcctggggatccagatatccccactccaaggacccagcgaggccctctctgtaggtggagctgtcagccaggtcaggtggggtcaagtggcacacggcagactcctgctacagagcgtgccgggcagtgggcgggcatgaggagccgtgcaaataaggaggcaggaggcagggtttccttcctgccatcaggaccctaggtatccccatcttctcagacgctggaggtgagcctgggctcaccaggaagaagcatgaaggaacaccatccccagccgctgcctccactcccatagccgtccctttcctctagggccccctgctaggggtcccctggccatcagtccccacacaggccacagcagaacccaggagccctggctccaggatggacagtgatagccgatgtccgtggggccatcactgagtgtcaggctctgttctgaccaggttatgtgcagtcatgtgctcagtttccacagccacccttgaggctaggtcctgtatgatctcagtgtacggaggctcagagacaccaagtgactggcccaaggtcacacagctggttgaggggagccatgcttcagacgcagatccatttgagcccagtacctttgtttttgacatggcattgatctgcctccaccagggtggcagaaggcgagaggccagtgtccttgaagcccccagaagggtcgggccagatgacacggcaaaaagataggagagatgtgcctgggactcacctggcacgtggcaggccaagatctggatacggatcggagcccacagctctggctctgtgtctgccagggcacagattcccagcactctgccacgtccctggcttctcaacccaaggggagtcgactcttctggccattggcagcgccagacaattaacagtcgaaagtaattgctcttggccgtgccagcagcccactttggttgatgagatggggaagtcagacactgatatggggctcccagggcaggccgtggcggggacggggacaaagctattaggaagggccagaaaagcagggggctcctgcaccccgaggtcccagcagggtccatggagccccgagtgacagggagcctctgctccgggccctgctccagcctcaggggtgtcgagttgagccttggccttcatgcccagggacagcaggacggctcacatcctggcaacagtcctcccatctccatccagacatccggcctgatgacacaggcagggatcccaatcgccagggtctcgaacagaaggggcagcatggctgtcagctgggctggggcgcatggggatgaggggtgcacggacgggggtggaccagaggcaggaagcccagggtgaggaaatgtcccgagggtgggcaggcaggatggagtgggctcccacccaatgccgaccacgcatgtctctggcccccagacagagctgtgaaccaaccccgctcacggctaacaagcccacccaccatggcgagccccactctgagccccgactcctcatcccaggaggccctgtcggcccccacctgctccccaacctctgactccgagaacctcagccccgatgagctggagctgctggccaagctcgaagagcagaaccggtgagttgggggctgggggatggggtgaaatcttggggtgcagtctgggcccccacaggagttcccaggtgccctcacattcagagccaggcccagtgtgtgcaatgtgacagccacctccagatgctggatgagggacagacacctcctttcatcctcccaaccctggctgaatatatgtgtccccaccctgttcagatgagactgaaggtttgagaggtcaagtgaatctgtgaatccgccgcggttaatggagccaggactggaggaagagtcgattcgggccttcctgctttcttcctctgaccctacccccatttaaaatgcaggttttaggctggacgtggtggctcacaccaccgaacactttgggaggccgaggcagacggatcacttgaggtcaggtgtttgagaccagcctggccaacatggtgaaatcctgtctctactaaaaacacaaaaattagctgggcatggtggtgggtgcctgtaatctcagctacttgggagcctgaggcaggagaatcacttgaacccgggaggcggacgctgcagtgagccaagatcacgccactgcactccagtctgggcaacaagagcaaaactccgtctcaaaaaaaagggggcgctgagggcagtggctcaagcctgtaatcccagcagtttaggaggctgaggcaggtggatcacctgaggtcaggagttcgagaccagcccgaccaacatggtgaaaccccatatttactacaaatataaagttagccaggtgtggtggcatgcacctgtaatcccagctactcaggaggctgaagcaggagaattgcttgaaccaggaggcagaggttgcagtgagctgagatcacaccactgcactccagcctgggcgacagagcaagactccatctcaaagaagaagaaaaaaaaaagaacaagagggacctaatccctggtgtcctctaagacccccaggagggggaggatgggctgggctcgccaaggatccctgtccccagggagtcactggttcccctctgtcggcccttcctgcccaggctcctggaggccgactccaagtccatgcgctccatgaatggctcgcggcggaacagtggctcctcgctagtgtccagctcctcggcctcctccaacctgagccacctggaggaggacacgtggatcctgtggggccggatcgccaacgagtgggaggagtggcggcgcaggaaggagaagctgctcaaggtggggggcggccaggcaggcagggctgggccgacggcgtgggcaggtggtgcggtcactcagccaccaggcagcgccagggtctgcggggccccagcctgggcacagcggcagcagtggagatgtgcaggcactttcagggtgtcctgccagagcacagggacaggagagagtgagtcagggtggtgctggacaggccctgcaccctcgagtgcccatgtgcttgctgccctgtagtgcccatgaaggatgggggtgtggtggctcacgcctggaatctcagcactttgggcggccaaggtgggaggatcgcttgaggccaggagttcgaggccagcctgggcaacgtaatgagactccgactctataaaaagtttaaaaattagccaggtaggccgggcgcagtggctcacgcctgtaatcccagttcgttggaaggtcgaggcaggcagatcacctaaggtcaggagttcaagaccagcctggccaacatggcgaaactccgactctactaaaaatacaaaaattagctgggcgtggtggcgtgcacctgtaatcccagctacttgggaggctgaggcaggagaatcacttgaacctgggaggcaagaggtagcagtgagccaagatcacgccactgcactccggcgtgggcaacagagtgagactccatctcaaaaaaaaaaaaagtttaaaaattagccaggcgtggtggtgcacaactgtagtcccagctactcaggaagctgaggcaggaggatcgcttgagcccaggagttcaaggctgcagggagctatgatcgcaccactgcactccagcctgggtgacagagggagaccctgtctctgaaaaaagggggtaaaaaaaggattggggaccatgagttctgtgccatgcttgaggcctggatgagccacgcctgaggagctgggctgggtggccacggggaggctgcgctgggaccgagtccagcccccgcttcccgctcccgtggccaggagctgatccgcaagggcatcccccaccacttccgggccatcgtgtggcagcttctgtgcagcgccacggacatgcccgtcaagaaccagtactccgagctgctcaagatgtcctcgccgtgcgagaagctgatccgcagggacatcgcccgcacctacccggaacatgagttcttcaagggccaggacagcctgggccaggaggtcctcttcaacgtcatgaaggtgaggcccagggctccccgctccctcggtcccaaaggaaggagaagttccccagttcaccggctgtgctggacggcgggaccctgctctcaggacttgttcccttctaggcatactcgctggtagaccgggaggtgggctactgccagggaagcgccttcatcgtgggcctgctcctcatgcaggtaggtggctggggggtggctgggctcctgccagacaacagcccaccctgggctcggcccccaagagatggacagaagtggcgtgtcctccacccagcgtcttgctaggggtagatcctccttctccatccacacccgtgacctctgccaatcgccaggccaaggcccagtgagtggcacctgtctggttgggtcctgtctgctgtaccatccaggacagagaccgggtttggagggataggctgtctctctctgccacatctcagggttggacaggaacctcaggctggggacttaagccatccagcgtggtgtttatggggcttgggggtctcctccagagaaatcgggaggctgacagggagagaggacgcagctgggacaggaggtatcctaaccagggggatgctggcagtggccagccctgggttcaggtccagctcccctgtttcctgccgagtggcccttggcaggtgacctcagcctcaggtcttccatcagtaaaacagcttgtgaggacacagggaccaacagtgtgtcatgagagtctagggagccaggtaccgacatggacatgggcccctgtaccccagggccctgatgagcagcgagatgcccctccccgctgcgctgccctgagcccccccacctgcccgtcccccctagatgcctgaggaggaggccttctgtgtgttcgtgcggctgatgcaggagtaccggctgcgggagctcttcaaacccagcatggccgagctcgggctctgcatctatcagttcgagtacatgctgcaggtgagcagggccgcaggagagcagggctgcaggagggcagggccacaggtgggcagggccgcaagggagcaggatcgcagaagggcagggctggcaccctagaccatacccgggcacctcttggactgaaaattccaagcctgtgaaatcacacctggacgttccaactccaaaaggcactcctctttccatgcagcactgccctgaaggatgcttggaggaacaggagagccaccactgaaggggggctcccagggctgctgaggcagaggggtggggcaggctcacatcggacacagccacagccacctccctgtctgctccagagtgtggtggaaggagggagtgttgtctgcctgcctgattactggagagccgcagacgtctgtttataaatagcagcccccgcagggcctgctcccggctggcaggcagagccgccaaggccgtttgcgaacatacacacacccgcatgcatacacacacacgcagacacacacacacacaccggcccgcctcagctgccatggcaggtggggctgtgcagtcatccctggatgtgacagccccactccctgggcctggatcatggacggtgctgtagccttagggggcctggtagtgccacaagcaggaggcctgggctgcagagaaggcaccaccccacctcaggctgggtagcagagccctcccacagccaagcttgcaaactcagggcgcagagagcccctggcgctgggaggaagcccgggatcctaacgccttctccggcctcagtttccccagccgtctgccactttctggctgtctagagttcaggccaatccaacacagcttgcacaaagctttatgctggggtccaagggaggtacagtggctggcaggtcacgtaacaaggtggggggggggctccccccagggccagaggctgccacttgcccatgctccacctctgggtctcagggtgtctgtggggagtgacccaactcccccagcctcagacacaccctctcaggctgtcgtgaggaccccatgagctgccacgggcgcatcacctacccagggtgggcccccaacacaggcggctacagatcttgccatccctgcctgtcccccaccccgtgctactcaaagctcgggggtgcttcggcctccctcagacagagtgctgagggagcaccaggaagggagcctcaggctgcccagcgcaggtccaggaaggctccctggaggcggggacactgaggcccagcaccccccggtgggagggcgtccccctcactgtgcccacccggcctcccacccctgcaggagcagctcccagacctcaacacccacttccgttcccaaagcttccacacatccatgtatgcctcgtcctggttcctcacactgttcctgaccaccttcccactccccgtcgccacccgggtctttgacatcttcatgtatgaggtgaggaccgatggtgcctggggagggaagagagccccttgggggtggttggaacaggagcctccctgccctccacctcccactgcctttgccgcctttgcaggggctggagatcgtgttccgagtgggcctcgccctgctgcaggtgaaccaggcagagctgatgcagctggacatggaggggatgtcccaggtgggccgggagggccagggccggtggggctgcccccaatcaggggcttcgagtcacaggatgccctcacaagtgacagagagggcccggcttcgagggtggaaggtggtgtgcctgacatccctgatctgttcccatccactctgttcccctgaggtctccctaagggaccagaggaccccctaggctctgccagacacagtcaggggccagcagcctggccgcagggagacaggaggcccaggctgagccctgggagccccactgcccacctcctgcccccaaccccgcagatgccccaaagcctgatggcagatcatgactgactgaccatgagggcatccccaccctgccgcccagcctggtgagggcacaggagggagtttgggggtctaggcaacctcacgccttgccccgccccagcccggcctgcctggaggccctgctgctggccagcctgcctcccaccgctacttctctgctgtgcgggcccctgccccctccccgcgtcctccagctggtgcttcagggaagaatgcacaaaggccacggttgtgtccgtgaacatgggcaggcattgtccacagctaccagagggggccagctgggccgggtgcaggagctgtgtcccccctgggcttaccttaaccctttgcacaggcccgaggcccccggcatacccatcctccttcccccacgaaggtcccctctgtcagaccccccgaccctcagccttcactcccaggagagcctccttggcctgcttttctttttttcttttacctttttctttttttttttaagtcggagttgctctgtggcccaggctggagtacagtggtgcagtcctagctcactgcagcctccacctcctgggctgaagcgatcctcccgcctcagcctcctgagtagctggaaccagaggtgtacatcaccatgtccagctaatttttttttttcagaaatggggtctcactatgttgcccacactggtctcaaactcctgggctcaagctatttatttctcccacctcaggcttttaaatcattgggattatatgaatgagccaccacatccagcatctgccagcttttcttctggaaactaaggctttggctgcaggcagtcccccattccctcccctcacgctcagtctttccattgctccacaaacactgaggacacggcgttgaggacatggcgacaccccgggcagacccgttcctgcccccctccagggcaacagggctcgggcggcccccggtggtcagggcctgcatgttggtgaccaggtgaccggctgtgtccccacagtacttccagagagtgatcccccaccagttcgacagctgcccggacaagctggtcctcaaagcctaccaggtcaagtacaaccccaagaagatgaagaggtcggtgcctgctgggcaaccagggtactggtaagaaggggggacccccgagggcatgacagtaaccacggggccctcccgatctgcaggctggagaaggagtacgcagccatgaagagcaaggagatggaggagcagatcgagatcaaagtgagtccaggggcccaggggcggggacagggatgggaggcctttgggggctgccctccgtactctaaagatcggccgctagggggcgggccttcccagcgcacaggcggacccggcggtccttggcggacaggcctccgcccacctgcgccgtccttcacctgttaggccagctgtgagcgcctcccccgcctgacgccgcggtaaccaagacagtcaaggtccctgccccgctgggccgcccagcgtcatggggaagcaatcaataaaccactgaactagagtgcggactctaaatgctctggacaaggatgtgcacgcggtgggcaaggctgacttgggcagaggctccgggcccagggtgtcgagggctaaaggcccagggcagcagcgtgccttgggggctggaggaattccaagaaggttgcagtggaggaccccgcaaggggaccgccctctggggaaagatggagcacgcagggcccagacaccagggtgtgtagggcagggtgtgggcactcacccggggcccctggttcctggggcaactggcccaccagccctgccaggtcagggggtttcctgagtgtgcaaagcttctctctccttccttgcgcattcttccctttacacgtgattttagttatttactcaacaagcatttattgccgggcgcgatggctcatgcatgtaatcccagcactttgggaggcggaggcaggtggatcacttgaggtcaggagttcgagaccagcctggctaatgcagtgaaaccccgtctctattaaaaatacaaaaattagctgggtgtggtagcacacacctgtaatcctggctactcgggaggctgaggcaggaaaatcacttgaacccgggaggcggaggttacagtgaggcaagattgtaccgttgcactccagcctgggcgacagagtgagactgtgtctcaaaaaaaaaaaaaaaagaaaagaaaagaaaaaaaacatttattgagcacctgctgtgtgccaaagtcacagctgagactgagggcgcaccagtgataggaagggacacagacacaaacccaacacagcctggctccatgctcttcaggggcagagccgcacagtggctaacactggagtccaacagacaaggattcaattccagctccagcggcacagtggctcacacctgtaatcccaacactttgagaggctgaggtgggagggtggcttgaggccaggagttggagaccagtctgggcaacatagcaataccccgtctttacaaaaatatagaaataaatacaaaaggtgtgcccagctcctgcaaggatggctgtgcttggtgctgtgatgggttgaagccagagagatgatagggaaacccaggggccagggatcagggctccagattgctatgaggaccagagacctgaaatagctctgacccagctgaactgagggactagggcaatgccctgccccactctgactcagtttccccacatgacatgcatcaatgactgtcaagtctgcggttctgtctgactgcatttgcttcctgggaatgttctaggtgtttccatcaccttttctccccagaagaaacccaggaaatattctgtgtgacctgcagtgtggcagggccctcactcacctgccaatccaaacaatttctgtaccaccttagtatcaagcaagggggcacaggtacagtcgagattcaactcgtttgcaaacctcacctgctccccagagtgtcctgggggaacctaaagtgcaaatatctttttctttttttttttttttttttggagatggagtcttgctctgtcacccaggctgcagtgcagtgaggtgatctcggcttactgcaacccctgctcccgggttcaagtgattctcctgcctcagcctcccctgtagctgggattacaggcatgcaccaccacgcctggctaatctttgtgtttttagtagaggctggtctcgaactcctgacctcaggtgatttgcctgcctcggcctcccaaagtgctgggattacaggcgtgagccactacacctggcctaaaaccgcaaatatctagccaaaatccatcagcacagaatggaaggcaggagcaagggagacgtcttcgaaaccccagccagggaacagagaaaaccactggggacaggttgctctcagcaggtcatgggaatgtagttgtcgagaaaggatgcatgatcagcacgctggacccagactcaaagaggagcctgcccccggaattgaacccgggtgcttggggcaaagcagcgaggggtgggtggtggctgctcgacagctgcttcccccactgattcccgcacaacccttggcagactgacccacgtgtgggaaggagtcttctgagggggcgtgggtactgactggcccccaaacacacacacagccacgaaggcactgacgttatttttactgaacccaggtttgttttaaaactttatttttttgtaatcaagccagtctgaacaggaattggccctgttttctgaaatcgctgacccagaacgtaagatgctggctgtgccctgcccggaaaagtggcctggccctaaggggactgaccccggcagtgggtaaatgaggggtgcatgtagacaggcgtggggggcgggctatgacgtgatctccccccacccccatagagacttcggacggagaaccggctcctgaaacagcggattgaaaccctagagaaggtgaggggcgtggccactgtgaggacatggtcgccatggggtgtgacccaccatgcggggcatggccgctaacctggggtggactcctccaagtcttctcctctctggaggactaagcagccctaccttcctgccccaggacccgacctgaacccgatttggagtgccctgcaactgggggcgactcgtatggtgattaatcctggagtgggggcgagttacaacccagtggcctgcagccacgggaatccatttgtgttctgtgccctccccggctgcacagacggggaggggtgaggaggagggagaactgccactttgatggacgagccccgtaattgggccacaagccaccccaccctgtaatttggaagtcttgccctcaaaagaaaggaaaggaaacccagtggaggagaagcgtggcgccatggtggggagccacagcccggactctgctccccaacatgctaaagatgggggtggaattgggggctcactgagccccagccccgggagcccccaattcctgctcctcactcgtcctcacttgaccctccactggccacaggaagtgggttggcagccggatttggttgccctcaccccaaagccttgttctgccttaaaattacaacgcaccccctcctctcccactctccaggaggtccgcacgaagccaaaagtccccctgccccccacagtttttccagccagcagcggcccggctgaccctggagggtgggacagtgggtttcccagccctgcggcctcccccacagccgcgggcacccccgacctccccgctcacaccgaacccctctccaggacggagctggctctagctttggtcttcctccgggtcctctcctgctggttctctggtcttccctcctctctcccccgcttctagagatagtccactgcgttagtgacaagtggttcttgtctgtctcccctctcctgtccccgcgccttccgctctgcctcctccccctgtcgctgggaacccccttcgccgggtaggagagcgctgctctggctgataggttaatccaggtactgtagctttttatcccctctccggattccttcctggccccttccctgcaccctgcacatgacagccagtaaccgcctcttccctgccattctgcgggcaggcctggcgccatgcatggagcagctggggaccgcttctgggggacacagaggcttcccgggggggcggggcatgtgaagtggggagaagggtgtgtgtggaggggctgtgagtgcgtttgggtgtgaatgtccacatgcatgtacagaaagcttcctccgggcgacacagggtggggacccaggagggctggggaacctaaaaccatattcacataaggccctggtgtgtgcagtgctgcggtcacacacacacacaacacatgcacacacacacacgcacacacacgcccggccctcacgctgctgctctctgctcctacctgcaatgcctgctaccaccttctctagctcacctgctcctgctgccacctcatcttgaatggctttatctggaagctgccacccgccacctggtggctttgagcctggaatggggggcccaagttgggtaggggacaaagatgaggtgggggaaaaaagggggtcttagctccaggcaggtggaggccccagagcccaggactagagaagatgccgctgggagaggtgaatgccctggggagcccagccctctcctgccggggcctcagctgtccccagatcctcaccctcaccggcagagtctggcatgaataggcacaggtggcctcgctgtgcccctggataaggatcccaactggggcagagactgagagccagagtggggaaggagatggagctttccaagcccagggctagctctgttcctcccgggctcctccaggtgtcctattcctgcctgtcacccacccacgtccccaggcccagtgggacgctcatcccaggctctgagtacgggaggcccccacctcacttccccccacctccactctctgggcctccccctgtggcgggaggcagggccttgggtgggagccgagggtcacggcctccccctgccccctgtcctcgctgttctcaggggcaagtgacacgggcgcaggaggcggaggagaactacgtcatcaagcgggagctggcggtggtgcggcagcagtgcagctcggcggccgaggacctgcagaaggcacagagcaccatccggcagctacaggagcagcaggtaggggcgggtgtgcggggctgctgggcggggccatgacccgcgcccccgcccccgcccaacggttttctttcagggctcataatctgccccgcctcagcacctggccctcctgttcctttctggggtaaggggaacccagagacaagcgcagattctcccccagcagctccacattctgagacatcctgatatccatttcttgccacctcatagtgtgtctgcagtatctgacttcccaacccccagcctcagcacggaggcctctgaagaccgggctgtccctgcagggtttcctctgtgtcacaggcagcagacagggctgtgactccttacggaggctcttgcctgtccccagggtctgaaggattgttaggtgtccctggggggccagccatggagaatgggagcagggcagtccgggactgtttggggagctctgagccagcagggtggggctgagggggcaccttgagtgtcttgagggccatgaactttgggtcccatgatgggcaggcccatgagtggggccccaccccaagattttcttctcctgaaagcttttagaacttaactgcgacctggtgcagtggctcacgccttaatctcagcactttgggaggctgaggcaggtggatcacctgaggttaggagttcgagaccagcctggccaacatgatgaagccccatctctaataaaaatacaaaaataagctgggtatggtggtgcgcacctgtagtcccagctactcaggaggctgaggcaggagaatcacttgaacccgggaggtggaggttgcagtgagccaagatggcaccaccgcactccagcctgggtgacagagcaagactccatctcaaaaaaaaaaaaaaaaaaaacttaactgcagctgcactcagcagttggccttcctgatcgcagggacccccagtggctgcagtcctaagccctgcaggccacagggacacatgccctggaggggccgggagcgacgctgtaggtcccgctgccatcctggcctgacccagcagggcctggcagtggggtgtaggttggagaaaccatggagtgcttgagaaagaagagccatccaatacagaggtgccccctccgcccccaggcccagagactgtggctcaagccttggcccagggattctagcggatccactgctcctggggagaaggagagcttcactgtttctcacttgtccccatgaaccacatccgtatgatgctggcgttgtggccctcagagtctgtgagcactcttgtcccaccttgctctgaggcagcatggacattagggaaactgaggctgggctcatcccacccactgcatgaggccgcctttcaggctcgttagagagactccaccagccacccctgagctccaaccttggggggatgcagagatcggggaggcccaaggccacctcctcaggcccaaagggaggccactgcaggcaagatgaggtggcccagaggagccacatggggcctggaggccatctgggccgaggcagagccaccgtcacacgtggatctcagagacccacaggaagaggatggtggctgggagggctgaggcagtcccccagagaactgtcctgccaggccacaaggtcagtgagagggagcccggctcccaccccagggaccaggtgtcctttttcaggtccaggtggcagtgtccatcactccaggggcccccactggggaacttctgagaagccagggcatggagcaagagggtgatacccacaaactctttcctcatccttccctgatttgaaatggagggtgggatgcagaggagagaggtggaaagacaggtgcacagccccaggcctctcccccaccccctgcctcgcccaccatgtggctggaacggtgaccacccagcaagaacccatctcccaccctcaccagtgatcccggaaaaccagtcactggggtcccgcggggcatccgaaggccaaggcaagtcacctttcagaatgtcccctctgtgcagcctttccaggaaggaagctggaccgggccagctgcatggatgccaggacctctaggccctgagcatcagggggtccagcccaggacaccccaagcctgggcccctctccctgctgaagggctctggggaggcggggagaagccagcaggcatggaggctgcccatcccccagccatggcctggggccccacgcagctctctgcctcccccaggagaacccccgcctcacagaagacttcgtgtcccacctggagaccgagctggagcagtcgaggctgcgggagacggagacactgggggcccttcgggagatgcaggacaaggttctcgacatggaaaaggtgcaatggggaggcagacgggcaggtgtcggggggaccctggggcacaggaggggtcctggataagctttgggagtgaccccaggtcagaatcccccacccccatgcacacacaaccatacatatgcacacacacagcacaaccccacgcggggcatgcccacgctcctgtatgaggcaaactccagcagcgtggcagcttctatgagcttcccggatacctgcatcccacctgtgtgtgtttcccccagtactgggttccaggaaggaagggaggagagagggggatgggggagggggacaggaaggagagaaaggaaggcccaggcccattgtggctgcctccctacacattcccatgcagacaccatcccagggcttctgggttcctccccaactgctctctgacttggcatcgactccactctcccacggagctcccagaggaaggaaagcacccagggacccattcacacattcagcaggagccattccccaccccctcgagcctgcactattttgggagtcctcccaaatggaggactgagaggccatctgcttccaggccctcatcaccagccaagagctgggctccgctcccgcctccctccacttcatagggaagtgtgcctccaggacatgctgctagatctgtcccagccctagacccaaacacgggtcagtgcggacctcatccagaaagctggatttgggtcctggagcacaaatcctccatcaatgagccctgggacaccaggacagggccaaggctggcactcagcctgttcccagggagagggactgcctggcctggtgtggcctggcctgggggccagagggcagacagggtgtttctgctggggcaggtcctccacctgatcatgtccctgaggggatggatctcagacctcggggagtcagtgtgtgcagcgcggcgtttatgggggttgccctaggacaccctgtgagagtaggtgctgttactacacccattttatagctgaggaactccaaccgggttccacaggcgagtccgctccccgtgggccttgtcaagggggtcgccctcccccatctgagccgcccaaggcagagctcaggaggaaacgtggctgggggcgtttgtcctgcaggaagggccatgcggctgcgctgctcccccaggccctgaccccactcttcccgcagaggaacagctcgctgcccgacgagaacaatgtggcgcagctgcaggaggagctgaaggcgctcaaggtgcgggaaggccaggcggtggcctcgacgcgagagcttaaactgcagctgcaggagctctcggacacctggcaggtgagggccgggtgggcgccggcgggcagagcgccccctagggccatcccctcggggttcttgggcggaggctgaccgccggcttctcggcttcaccccccaggcccatctggcccgcggcggccgctggaaggagtccccacggaagctggtcgtgggcgagctgcaggacgagctgatgagcgtgcgtctgcgcgaggcccaggccctggccgagggccgcgagctgcggcagcgcgtggtggaacttgagacgcaggtggactcggggggcctgctcgttggggaaggggcgtggtgtccgtggccagcccctgagttaggccctgaccgccgccgtcctccgtcctcccttcctccctatcccaggaccacatccaccgcaaccttctgaaccgcgtggaggcggagcgcgcggcgctgcaggagaagctgcagtacctggctgcacagaacaaggggctgcagacgcagctcagcgaaagccgccgcaagcaggccgaggccgagtgcaaggtgcagacccccgcggccccgccctgcccgtggcaccgcccccggacgcgcccctacatgaggccccgcccccaatccgcctctgccggcgtcctgcctcccgatctgcccctgcccgcggtcctcccgcccccgcccgcggccccgcctcctgacctgctcctgcccgcgaccccgcctcctgatccggccccgcctcctgaccacccccccccgcggtcccgcctcctgatccgcccccgcccgcggccacgcctcctgacccgcccccgcccgcacctcccttgcccgcggtcccgcccctgcccgcggtcctgcctcctgacccgcctccgcccgcggccccgcctcctcattcgcccctgcccgcggtcccgccccctgatgcgccgcgccccctgacccgccctcctttccccccaatcccccgaccccagagcaaggaggaggtgatggctgtgcgactgcgggaggcggacagcatggctgcggtggccgagatgcggcagcgcattgccgagctggagatccaggtgatcggcggggccggggtcggggggcgggggcgggggcagggcccggggcaggagcggggccggaccccaggcccagcatggcactggccccgcgtgacctggcgcaccccgcagagggaggaaggccgcatccagggccagctgaaccactcggactcatcgcagtacatccgcgagctcaaggaccagatcgaggagctgaaggccgaggtgagccggcgcggggatgccggggacaggcctgggtgtcgtcggcctgggacgagccgagcgcaggtgccttgcggaggatgcggctgggagggcggggcagaaggccggtccacgcctgcagcgccggtcccccgccccaggtgcggctgctgaagggcccgccgcccttcgaggacccgctggctttcgatgggctgagcctggcgcggcacttggacgaggactcgctgccgtcgtcggacgaggagctacttggcgtaggcgtgggcgctgccctgcaggacgcattgtaccctctgtccccgcgcgatgcgcgcttcttccgccgtctggagcggccggccaaggacagcgagggcagctcagacagcgacgccgatgagctggccgcgccctacagccagggtctggacaactgaggccatgcccagcgcgcccggagtcaggaggccgcagccgcggggggcgcccgggcagtccgcgttctgctccccacctgccgcacttgacaaactacgcgccctctgtggctcggccacccctaaagcgaggcccggcgaggcagcgcagagggtagggtccgacctgggctcctcagggccccggggcaggctctctatccccagcagtgtttacccatcttggtctgtacccctccgggccctctggcgttccaggggtgcctggaggggctgactgctctcttaacaggagggcagagggcaggggacagacgacccagaggtcccagcactgaatgagcaggcagctcccacctcctggcaggcttccttctgggacaggggcgacattgctgggaagtgctcaggaggtagccgaggcctgaggaaggagagcgccagctctgggctggacatcagcaccccacaacactcctcgggatgaagtgacccttgactagcccctggccatctctaggggagtcaggccgctggggacagatggccaggccggcctctcctgcctggcgcaggcaccgtggcccctgcagcggaaaccaaagtccccctactatgtgcggggcgcctggggactgagtggctaacgggaagcctccctgcttctctggggccagagcagcttccaggaagtgaagagacccctctccccagtgccccacatctttctctgggagacactcgcgccccctatcctggccagtgatggaggggtatctctacaggggtcctcggtctccatctacttccctttcttcatgtgtttccagccccaccctcagccagagccaggcccccaggcaggagcttcccagcgagcggcctcccctcacttcctcctggtggtcccgttgtctctgctgaatcagagctgagaacggtgccaaaatccaacgatgccccccaggccccttcctcccttcccccggccccccgggcctcatgaccctgggggctgcccccctcggtgctcccggagcctccagtagagtagcgtcacaagcaatctccctggcgcttcctgggtggggacccctgctccgtccccgcttcctagctgcccacttttcagtgttacgaagcctggggaccggggcaggcacccacggggctctccacacgccccctacactgcccgccaccattttgcacactgcctgttcacatgtcgcccaggcgggaaaaatggaaaataaagtgtatttacacagtcacggactggcctgcgggctgggaggagaatcacaagcagcggtgggtgcccagcccagggaccaaaaaccgtgctgagggaaggtggggctgtccttgcccttaggagctccccacagtctcatagaatgggggtgggagaggatagaagggcattcagtttgggggcagggcatgatttcccacctgggtgaatcaacttgggcctcccctgaaggagagaggcatgccgaatcgctgggcttcaggaagcacaggacccggttgcattcattctgctcacgcctccaggggtaatgtggggtactctgccctgtgcctggctctgagggggtctccagtggagcagaggagacaggcactgggcagggggaagcctgcactaatgtggtaggtgctcaatagacaaatgtgcagggagatcagggaaggcttcctgggggaggtggtgtcagggcctcttcgaggggtaaaagcataaagatcagaccaacaggaggcataccatacctaggaaggaagaacaggaaagcctgggcgtggtcagactaagaagggactgcttacgtcaggtgagggagtttgggctttgaactgggggccattgggagcccatggagggcttaggtaagagagccccatcagatggaccacagagtctgtgagggggccagtgcagggaggacagtgagtagggggcagaaatagtcctttgtggggttccccacagagctgaggcagagtcccagctgctgggtggcggtgggtggcggggtggaggacagagccaggagtggcaaagcaaagcttcctagaggaactcaaggcagtcgactcactgaaacgtccatctcctgggttccagtgattcccctgcctcagcctcgagagtagctgaaactgtaggcacctacgaccgtgcctggctaatttgtttcgttttgttttttgagagggagtctcactctgtcacccaggctggagtgcagtggcacgatctcggctaactgcaacctctgcctgctggtttcaagtgattctcctgcctcagcctcctgagtagctgggactaccggcgcctgccaccacatctggctaatttttttttttttagacggagtttcactcttgttgcccaggctggagtgcgatggtgcgattttggctcactgcaacctctgcctcccaggttcaagcaattctcctgcttcaccctcccaagtagctgggattacagacatgtgccaccacacctggctaattttgtattatttttagtaaagatggggtttcaccatgttggccaggatagttttgaacccctgacctcaggtgatccacccgcctcccaaagtgctgggattacaggcatgagccactgtgcccggcccaatttttgtatttttttttttaagtagagactgggtttcaccatattggccaggctggtctcaaactcctgacctcaggtgatctgccctcctcggcctcccaaagtgctgggattacaggcgggagacacggtgcgcagcccctagaggcagaaacataattgggttcaggcagatgctagccaggacctgccctctgcacccagtgtgggtccacaaagtgctccctacccccatgcctcacagccaagcaaaggacatgacactgcttgtgtactgagacagccaagtcccatgtactgtcgtatcacatgccacagctctcctggccacacatggtgcagatgtaaccctggggaccctcacagtcactgtccgtgcctcctgcttccatggtaattccacccccgctggctgcccaggtcagggcaggaccgcagaggaattgtctgaggttctgccctgtccttcccggcagctggccttgagccccagctccccagcatgtcaggagtcggccttgggcttgtcccagagtctggaaacaaagacacccaggtccccaaccccaccagggcccagcttgagaggacacctctatggtttgccacaaaactctgaccgaaggactgtgctggcgtcctcctcctccacctcccaggggtgcaggtggcagtgcccctccaggccagagcccatttctcctcagaccccaggctaggaggtgccttgtctgggatggggacaggcaggacttgctggtctgtgactgacaggaacctggtcacaggatggtgtgagggtactgggtccaggggcagaggcagggctgagggcccaaggccagatcctactctgtcttcttacccacttggggatgtcaccatcattcttggtgccatgcaggagacccgggggaggaaaggcctagcaggggagctctctgcaggggcactgggaacagggagagactggctagggtttgagaggctccagagctgggggttagggttagggttcattgggggaggaagggcaggaaactctgattggagggggcctgtgaagatgtttgggaatctgataaggacgcctgaggaaggggttagggcaaggatgccatgggggtgggatgcaccaagtggcacttgtgtaaggacacttggagacagggtgcagtgtgaggactcccccatctcccacctagacctgggagaggccacttcttcctgcaatcccctaccagggcagttggcccgggaccctgcaccagccgaagggccatgggaaggggtcccccatccttgcctcagtgccctccaatcttcccacctgttccccaggagtgctagttccccgcatcgagtttgaaaagtgtgtcaggccaggcgcggtggctcacgcctgtaatcccaggactttgggaggctgagggcagatcacctgaggtcaggagttcaagactagcctagccaacatggtgaaaccgtgtctctactaaaaatacaaaaattagccgggtgtggtggcgcgcacctgtaatcccagctactcgaaagactgaggcaggagaattgcttgaacccgggaggcagaggttgcagtgagccgagatagcactattgcactccagcctgtgcaaagagagcaaaattctgtctcaaaataataaaaaaacaggccaggcgcggtggcttatgcctgtaatcccagcgctttgggaggccaagggggttagattacgaggtcaagagatccagaccaccctggccaacatggtgaaaccctgtctctactaaaaatacaaaaattagttgggcgtggtggcatgtgcctgtagtcccaactacttgggaggctgaggcaggagaatcgcttgaacccgggaggtgaaggttgcagtgagccgagatcgcgccattgcactccagcctggcgacaaagggagactccgtcaaaaaaaaaaaaaaaaaaaaaaaaagaattagaatagaatagaaaagggttccagtcgctccttcacctcggccacgcactgactcatccactcgggcgcacagcccctgccaggcccctcctgcaccgaacgtttccaccagaagtcggataccaagaagcccaagttcacacacgtggatgggtgcgcggcaccagatggccgggactcggcatggccccgccctagccccacctggcctgccccttctctcccagaagaggaaaaccgcactttatccagagctccaaccggttcgagcacagccgccagcaaggccttatctggcctggccccccgcgccgctcagcctgctggaggcccccagccccagtcctctctgtgacagcgaaggtgtgcaagtcccagtgtcccagttttattgcaaactcaggctgtgcggggtgggcaatacactgcacacggggcgggactcggggaaacggggcgtgtcctaggccaaaggggcggagctcgaggggcgggcctaggtcaaagctgtgggtaggtcccgagcctccgaggccaaaggctcaggctctagggagctaagactaatccacccagcggggctccagggcagtggaggcggggtctaaaacaaacggcgtacccggaggggcggatcctaaggcaggggtggggtgtagcaggcggggctgtggtctggctcagtggaaggtctccacctccaccacggtccagtcaccctgcggggaggccacgtcgtccggagagaagctggtgaccgaggtgatgctggcacgggactcgtccaggggagacagtagttcggcccagcggccgagttcggcgtcgctgagtgcagcccgggcgccccctgtgacgccaccaccctccgcacctcctgggcccccgccgctgccgcccgcggcaccctcggcagccgccagcagcagcgtccggctcagcaggtgctgcacgacgctcgcctgcagcgcccccagtggcagctcgcccaggcgcgcctgcttcgggctccgcgaggacgccccggccccggccccagccgccgccttcccaccgctcgtgccgggactgggccccggatccagtgcgccaggggcgggggtcgccgactcgggcccttcagtctcgtagatggtgcacagaccgtcagcagagcccggtccggtagcgggaggccacggcaggggcgcacctgcggggagagacgccaggtgggccgtgggggtgataagccccgcccctgcctcaaggtcccgcctccttgtctaagctccgccccggacccagctgtcccgcccctgagctgcgaagcctcgcctccgaccccgcccacagccaggccgggtctggggtgccccttacctggggctccgcggaaagccagcggcggagcggggcctcgactccaggcagccgggtggcaagcggcgagctctgcgtcggggggcggggaggctgcggcaccgccctcgggcccgctgtcgtagccacgcagctcctctggcgtgctcgtggcgctgctgctgtggccggccaggtctgggccgctcagcgtgctggacgggctgcgcgagggcggcggcggcgggccgggggccaacgccagggtcagccgtgggcccgagacggaggtatccggacccggggtcggggggcggcgtggggcctgcagggtgggtgaggcagggggagagggagggacctgcagaaggggcgctgccagaacaggtggggcctgtggaggaggcgtggccaaaggagacattgggagtgaggcagagggtgagaaaggggcctgcccagggaatgaggcaggcggagagggaagggcctgcagaggaggtgtggccagagcaggtggggcctgtggagggggcttagccaaaggagacattgggagtgaggcagggggagagggcgggacctgcagaggaggagcggcaagaaggggtgggacccgtggagggggcgtggccgaaggagacattgggggagaggcagggggagagggtgggacctgcagaggaggcgcagcgagagggggtggggcctgtggagggggcgtggctgaaggagacattgggggagaggcagggggagagggtgggacctgcagaggaggtgcggctagagagggtggggcctgtgaagggggcgtggccgaaggagacactgggggtgaggcagggggagagaaaggggcctgcactgggggtgagggagggggagagaaaggggcctgcagaaggtgcactgccagagcatttggggcctgtggagagggtgtggccaaaggagacagagggggtgaggcagggggagagggaggggcctgcagaggaggcaaggccagggcaggtggggcctgtggagggggcgtggccaaaggagacagagggggagagggcaggccctgcaaagggggtgaggccagagcaggtggggcctgtggaggaggcgtggctatggaagagggcgtctccggagggggcgtggtcaatggcgaaggtggtgcttgcagagggcatggggctggacaaggtggagtctccagatggggtgtggtcaggggagcagaagctgtctgcagaggaggcggggctagagaaggtaggttctccagagggggtgtggtcaggggagcagaagctgtctgcagaggaggcggggctagagaaggtaggttctccagagggggtgtggtcagggaagcaggaggtgtctgcagagagggtggggctagggaagattgggtctccagagggggcatgatcagggaagagagaggtgcctgaggagagtgggaggccagagaagatagcgcctgcagagggtgtatggtcaggggtgagcttaggggtgagacagcaggagagagagaagtctgcagagggggtgaggcaggaagggaaagaggggcctgcagagggggtgaatcagggggagtagaggccggccgagaaggtgagatcaaagaagcttgggtttgcctaggggacattgtcaggaaagaatgtgtggcctgcagagtgggtgagcccaaagaagttgtggcctgcagagaggacaaagccagaggagagggaggtgcctgcagagacggtgaggtcagagaatgtgggacctgtattgggggaatggtctggagagagggcggggcctgcatagggggcgtagtcatagaaggtggggcctgtgggtggggcggagcctgcagaggcggtgaggccaaaagagagggagaaactagaggaggatcctgcagagagactgtggtcaaaggagagggagaggcctgcagaggcaatgtggccagaagaggagagtcctgcagaggaagagtggccagagtgtggggcgtggcctggagagagggcggagacggggaaggactggcctgcggagggggcgtggtcagagcagaaaggcctggctgagggagtgcggccaggggaaaagccgaattccccagagatgttgccggagaaacagggccttgtagaggagacatggctgacagaggaggtgtggccaagggagagaggagagtcggaagagagggcaacgctggattagcttgggtggggggcatactctgcagaggggatgaaactgatggagagactgaagccacaaaagcggctgtggccagggaagagacgcctgcttctggaaaggacataatcagctgtgtgggtggaacttgcgaggggggcgtggctggtggagaggggagggtctgcagagaaggtggagcagagggagaaggaggggctagaggaaggggcgtggccaactgacaggtaaggctcgacgagtggggcgtggccggcagggtgggcggggcctgactttggagagcggctggcggagggggcgttaccggtggagagggagggagcgtggctggcaggggagtggctgcattgtcgggaggcggtacgggtcttgccttggtacccgatggagagggtgtggccaaaggagaggaagaaagcggtcctagtgctggggctgcgtccttccttgggggtgtgacctgagggggtcgcagagcctgcagtcctttcggcttgggctgcgagggatgcgcaggagccctgggtgttccgcgggctgagggcccagaacgggctggggaggagagaggggtggcgctggagctcagggagcgcgaggccggcctctggagacccccaccggcgctgggccgcctcctggcagccgggcttggctcggtggtactgtgctccgaggcgctgctcactgatttccgggggccctctgtcgggggccgtggccgggcactcggagctggccgggggagccccacctcggtgcccgcagcccgggaccgacgggccatggccggggacggggttcctggggtaggcccggaagtgtctggagaaaaagtagaaggccaagggtcaccgatacctctgaggcggctccccttgctgcccaggaaccccactcttctccaggtcacgtacctctccgtgccccagcgctgagggcactccttttgggagcctctgtagcttttcctctggccacagtttcctccgctgagatccggagtcccttctggccaagagggcctggcctggagacagaaggggccacgctcaggcctaggtctttgtttggcttcccaagtctctattttcccatctgtgaaatgggcatgtgccctctctgaggaccaataatggctttcacccaatttgtgcccagtgacctgcaagtgctcccgcgccccaactcgtgtaaaataaaaggttccagactctgtgacgctaaccctggcttaggagactgggggagagggagcaggttacctggtggtcccgctggcacgccctgggctagaaacagggcctgggctggtgttcttggcaggaggagctctctcccctctcccagaggctgggggcctggaggctgcggggagaaggccgagtcacaggtgccccggagaggtggcagtggaggtgagactggacaggtattggaagggggagggaagatgggggcggagctgaggaaggaggctggggtaccagggtttcgggaacttgtcccagcactccgcgttggtcccgctcggggagcagactcgggaatagtggccccgccgatgccccccgctcgctctgccagaggctttcgccccactgctcccgcagctcccagaactcggagggctgcgggagttactgggggagggggtcgaggagagcctgggggcctgggggtcagaagtccaggagcgcgagcagccggcgtccgcgcggcggcccctgccttcgccttgtctctcttgttgtccatcttgcacctgaagagacaaaccggtccgcatcccaggttctggacagctacgccgcctccagagacctggaccctgctacctcactgccctttcgcagcatcgccacccatggacactcaaacctcggcctcggcttccatccgctcggctcccacgcacctacacccactcgccagccccactgctcctcgctgtccccaagtcccaccccccaccgcttttccctaaagcgaagaggccctgcccgccccagcccaccgcctcccccgcctcggctccaattcaggaccgatctccacgcccctgccccttgccccttcagggactcagaccgccagcctcgagagcgggggactgccacgggctcaggatgtcgcatccctccagacccggagcgcacgcccgggtctccccgccagcccccatcggcctcccctggcctccccgagggatgcctgcacctgccgggaggcagagcggccccgctgcccgcgaacgggctccgggagacaaagagccgcgtcccgggcccgacccctcccccagccgggcctggcccgcgcccagcctctccacctgctcgcgtcgcgctcacctccgcctccggcctccggccgctcctcacagagtcgcctggggtggggcccgggccggagcgacgcggtggccgccagcggcgaggaggcgaggggagggggctgcgggctgcggcgccgggggagccgagccggtcccgcccctcggccgcgggcgggagagccgggggcgcgcgctcgatccggacccgggagcgcggccggcggaagcgcgccgagggggatgggggagaagcgcgctttggagagaagggtggcttctctgcggtccgggggaagcctgtttccccagctgcgcctgaggaacccagatagtcaacggttgggactgggggagcaaatccctggggtcctccactgtccttcccaacacatacacctgccccgacccccaccacaaccacctggcaccaaggaccgcctggacgcggataggctgggccctggcaaccaggaggcgggaccaccgcgcctctggcccacacaccaatccggccgctcggtggccctggcactatccagtccttcgcgtctgcgaaagctaggccgcccagggtctctggggggcagccgccctccgccccacacccgaaggtgttccccagacgccaggaaaccccttatctggttggggggtcgagggactgctaagagaatgctgccctgggaatttcaggatgcaaggtagaccccagattttggggaagataaagaaaggaataggagggagagcgacaggagacacagtatattctgtgagaggtgacccagccgtctgcagggtagagcacgcccaccctccacaccctcccagctaacgggatgtcaagtcagcccagacttcctggcagagctgggcttccgggggacaaggttctgtcgacctagcaggtgtcaaaacaagtgcataaggccgggcgcggtggctcacacctgtaatcccactgctttgggaggctgaggcgggcggatcacttgagctcaggagttcgagaccagtctggccaacatggcgaaaccctgtctctaccaaaaaatacaaaaattagccgggcatgctggcgagcacctgtaatcccagctactcgagaggctgaggcaggagaatcgcttgaacccgggaggcggaggttacagtgagccgagattgcgccactgcacttcagcctgggcgacagagtgagactctgtctcaaaaacaaaaacaaacaaaaaaacaaaaacacaagttcatgaaggacgcagaagatcctttacaagggtcccagcccagccggagcgagtgggaggtgtcctgttgctgacttcagccagggcaggggcctcggtggagagcggtgctccaggactgtggcatgaagagggtgggagcctgagggtggaaatggccattcctcagctccctctccttataagaagagtctgggccgggcatggtggctcaggcctgtaatcccagtactttgggaggccgaggtgggcggatcacaaagtcaggagatcgagaccatcctggctaacacggtgaaaccttgtctctactaaaaatacaaaaaattaaacgggcgtggtggtgggcgcctgtagtcccagctactcgggaggctgagtatggcctgagtatggctgagaatggcgtgaacccaggaggcagagcttgcagtgagccgaaatcgtgccactgtattccagcctgggcgacagtgcaagactctgtcacacatgcacaaaaaaagagtctggccttgtcacctctgtcggccaagtcccctcctcatatggcctccatgagctttccgcctggatgtcgcatccctccagacttacagccactttttaccccattccaggaaaccagcgccctgtgccccactgctaaccccatcgcaagctcatatgcacagttcactccctcctggaaatcagggggcctccatgcacaggaaacagataatgcaacttggcatcgggtgaactggggttggggggtagggacgttgcgcccatttgaggttgcagaaatggaaggcagagaaaaatgacagagctgaatgccatgctttgacctccagattggatcatcctaggccttatcttctccctcagtctagcaatgatcacccgtgtgaaccccttgtggcatgacaccagcctggttccctgtctacccacccacacccagtgcctccttccaaatcacatccaccaacacagatccctgccctcctatttatttatttttgagacaggatctcactctgtcacccaggctgaagtgcagtggcacgatcatcacagcttcacagctcactgcagcctcgacctcccaggctccagtgatcctcccacctcagcctcccaagtagctgggactatcagccgaggcgggtggataatttgaagacaagagttcaagaccagcctagtcaacagggtgaaactctgtctctactaaaaatacaaaaaaattagctgggtgtggtgcctatagtcccagctacttggaaggctgaggcgcgagaatcgcttgaacccaggaggcggaagttgcagtgagccgagatcatgccactgcactccagcctgggtgacagagagactccatctcaaaataataaaaaataaaaaataaaaataaaaaacaaaacccagatcacttgaggtcaggagttcgagaccagcctggccaacatggtgaaacctcatctctactaaaaatacacaaattagccgggcatggtggccatgcacctgtaatcccaactactcgggaggctgaggtaggagaatcgcttgaacctgggaggcagagggtgcagtgagccgagatcacgccattgcattccagcctgggcgacagagcaagactccatctcaaaaaaacaaacaaaaacaaaaacaacaacaaaaaaacaagtagctgggactaaagcctaccccaccatatcaggctaatttttaaattttttgtagaaacagagtctcgctgttacccaggctggtcttgaactcctgggctcaagtgattctcccacctcagcctccaaaactgctgggattacaggcaggagccacctcactcagcttcacctgccttctgactatgatgcaagggttcctccagggtacacaaaacccaccctgtaattaattgggatctggactctgccctcttataaaaacactcccaaaacctccatcaacaagagggatgagtaacatgaatcaaagtgtcccctacaatggaatgaaacttggcaacagaaaggaacagactatgctactctcaaaacagggactaatctcaaaagcacaccgaacaaaagaagctacaaaaaacacgcactgtatgattccatttatagaacattccagaaaatgcgactaatctgtagttacagacagcacatcagtggttgcttggaacaggtgggggagggacattgaatgaactgcccagcgtagccactcttaggcatgtgactctcaggtgagggccaggcgactgtagtcccagctactggggaggctaagacaggaggatccccttgaggccgggagtttgaggccagctagggaaatataaggagaccccgtctctaaaagaaaaataaataaatcacaaatatatatgtatatgtgtgtgtgtatatatatacatatatacatatatatacatatatacatatatacgtatatacgcatatatacatatatacatatatacgtatatacgcatatatacatatatacatatatacgtatatacgcatatatacatatatacatatatacgtatatacgcatatatacatatatacatatatacgtgtatacgcatatatacatatatacatatatacgtgtatacgcatatatacatatatacgtgtatacgcatatatacatatatatacatatatacatatatatatatattttttttttgagacagagtctcactctgtcacccaggctggagtgcaatggcgtgatcttggccctaatttttaattaattaatttatttttgaggcggagtttcactcttgttgcccaggctggagtgcaatggtgcgatatcagctcaccgcaacctctgcctcccaggttcaagcgattctcctgcctcagcctcctgagtagctgggattacaggcatgcgccaccatgcccggctaattttgtagttttagtagggatggggtttctccatgttggtcaggatggtctcgaactcctgacttcaggtgatccacccacctcggcctcccaaagtgctgggattacaggcgtgagccactgcacctgggcatatatatatatatatatatttttttttttttttgaggaagcaatttctttaattttatcagaatccaggacacaacaagaaaagcacccaaaaaccacatggagacagaagatgagacacaactcctcccccaccccttccctgctctagagtggggacaaagtcagagtgagacagcttgggggagacctgaacctcagtccagccctacaggctccaggcctgcagggaaggagggtaatggggaggcagggcccagccccccagtttggggaaacagctgagggaaggcccccctcaaaaggctccacctcctcaccagcactcctgcccagggacagggagcccacagcagcaaggggacctcagggccatggccaccttcatgactgagaagtagctgagtggaggcaggagacacacgattatctgggcagaatcagttagagcaggggcctggaagggccccatgggccaaaccctgaggtcacaggaggggccccaaagcggggctagtgagtgaggtcctgagtgagtgggtcagcagctgggcccctttctctagcttcctgtagcccctccaatactgctgccagggaggcctgcctccagggaaatgggataagaaagcagcctgcccctgctgcagacagagccaggtggctgaggccaggaaggaaagcccggccaggccttgccacctgccccagaggcctgtgggaaaaggacaggccaggaagggtggggacaggggctcgactggctcagatccaagatggtgccacgcttgcttgctgagtcccccatgagctggggcaccgcactggggccagcgactagttagacagaaggcagcaacttctccaagaaattccttcacagctgccatctcctgaggacagcagctgtgcatgacacccgagtatgtcttgaactggaccctggcaggtgtgacaacagccgtcagggtcccaaaccgtacgggcaccatggggtccagctccccatggcactggaggatggtcaggcccttgccactgcctttagctgcctgggggaaggcccggtgcagaggcagccagcagctcgatgctacgataccagccagcgggtgggggcaggtgagggccgtgtagagggacagggccccgccctgtgaaaagcctcccaggacgattcgattggcagggatcccgttcttcatttcatgctcaatcaaggccttgatgttctctgctgccttcttgatgccagcctcgtcctctggggcatctggactcagccccatcaggtcaaatcaggaaggtgtcaccatcttcatgttgagagtcacagggatcctaggcacatggggacagatggaattgacgtgagggagccggacggtggagagggcgtcagcccagctgtgccctgtgtctccaagtccatataaaaaactaaccgcggctgtttcccgctcagctccagacaccgcggcagcatcagtgagaggggcgtagacgtggtgttaccacacatacaccacatggctccacggcgggagcctccactccctggggcttccgaggccgcttgggcgattctcctctttctcccgcagacacacactcttccccctcggccacccccactccatatatatatatgtatatataaatatattatatatataaatataaaaaaatatataaatatattatatataaatataaaatatacatataaatatattatctataaatataatatatataaatatattatctataaatataaaatatatataaatatattatctataaatataaaatatatataaatatatttatatatatataatatattatatatatataatatattatatatatataaatatattatatatataaatataaaatatatataaatatattatatatataaatataaaatatatataaatatattatatataaatataaaatatatataaatatattatatataaatataaaatatatataaatatattatatataaatataaaatatatataaatatatataaatataaaatatatataaatatacatatattttttttttgagactgagtctcgctctatcacccagtctggagtgcagtggcgcgatctcggctcactgcaagctgcttcccaggttcacgccattctcctgcctcagcctcctgagtagctgggactacaggcgcccgccaccatgcccggctaattttttgtatttttagtagagatggggtttcaccgttttagccaggatggtctcgatctcctgaccttgtgacccacccacctcagcctcccaaagtgctgggattacaggcgtgagccaccgcgcccagctatatatatattttaaacagtgaggggctgttttgttttgttttgttttttggttttgtttgttcgtttgtttgtttggatggagtcctgctctgttgcccaggctggagtgcagtggtttgatctcagctcactgcaacctccacctcctgggttcaagtgattctcctgcctcagcctcctgagtagctgggattacaggtgcccaccatcacgcccggctaattttttgtatttttagtagagacaagttttcaccctgttggccaggctggtcttgaactcctgacctcacgtaatccacccgcctcagcctcccaaagtgttggtattacaggcgtgagccaccgcgcccagcccctaattttgtatttttagtagagacggggtttcgccatgttggccaggctggtcttgaactcctggcctcaagtgatccacccaccttgacctcccaaagtgctgggattacaggcgtgagccactgcagcccagccaatacatacttttttaaagctagtaaatttttgggtaatttgttacaaagtaatagctaactcacattccaaaatcttagaagctggatagtaaataacaagtactgaggggcgatgtggagaaattggaacacaggtgtcctgttgatgggaatgtaaactggtacagctaaacccagtgcagtagctcatgcttgtaatcccagcacttagggaggctgaggcaggccgatcacttgagctcaggagttcaagaccagcctggccaacatgacaaaaccccgtctctactaaaaatagaaaaattagctaggcgtggtggtgcatgcctgtaatcccagctacttgggaggctgaggcaggagaatcacttgaacccgggaggcggaggttgcaatgagccgagatcacaccactgcactccagccagggcgacagagtaagattccatctcaaaaaaaaaaaaaagaaagaaagaaaagaaagaaatatttgtaccctcgtgttcatagcagtagtattcgcaagaaccaaaaggtggaagcaacccccaagtgtccaccagcagaggggtaaatagataaaatgtggttcatccatgcaatggaatattatgcagccctgaaaaggcagaaaattctgatgcatgctgtgacatcgatgaaccatgaggacatcatgctcaggggaataagccagacacaaaaggacaaatcctgtgtgattccacttgtaggaggtccctagaggagtcagattcatgggagacagaaagtagaatggtgggtgccagcagctatgggagggaggtggggagttagtgtttcatggggacagagtttcaatttgagaagatgagaaagttcgggagatggatgttggtgatggttgtacaaccatgtgaatatgcttaatgccacggaggtgcacacttagaaatggttacaatggctgggcacagtggctcatgcgtgtaatcccagcactttgggaggctaaggccagaggatcgtccgagaccagaagttcaggaccagcctgggcaatatatcaagaccccgtctctacaaaaaaaaaaaaaaaatctaaaaaatagctgggtgcggtggcacacacctgtagtcccagctacttgggaggctgaagtggggaggatcacctgagcccaagggttcgaggctacagtgagctatgatgaaaccattgcacaccagtctgggtgacagagcaagacctcatctccaaaattaaaaaaaaattaaactggccaattttatattatattggaccaaaatttaaatttttttcttttttccttttaatttcaggagaaaccttaaaagccaattgaaaaaatatgtcttctttcttagagacgatgcctcactctgttgctcaggaaggagtacaatggtgcaatagtagctcactgtagcctcaacttcctgggcttaagcatttctcccacctcagtctcccaaatagctggaaccacaggcatgcgccactgtgcccggctacttttttttttttttttttttttgtagagacggggtctcaggtctcactgttgcccaggctggtctcaaacccctgggctcaagcgatcctcctgcctcagcctcccaaagtgctgggattacacgcatgagccaccgtgactgacccatattttttttaagctagatattatcatgtggaaagactcacacagtagcaatgggaatgtaaagtgggcagcctttctgataaataattggaaaggattgagtattggtgtgctatgactcagccatcccactcagcatctatacctgcagcaggtgcatctatacctgcggcaggtgcatctatacctgcggcaggtgcatctatatctacagcaggtaccataccaccctgtctatatccctgagcactcacagtccctgtgggcagggaactcagaagtgccagagagttaacacctctccacctcccttctctggagcaacccttaggcagggacagacaggagctggtggagaaatacttcaatttcctcgaccctgtaatcccagctactcaggaggctgaggcaggagaatggcttgaacccgggaggcggaggttgcagtgagctaacaccactgcactccagcctgggcaacagagctagactctgtctcaaaaaataaaataaaaaagatgctaggccgggcgcggtggctcacacctgtaatcccagcactttgggaggccgaggcaggcggatcacctgaggtcaggagtttgagaccagcccggccaacatggcaaaaccccatctctactaaaaatacaaaaattagccaggtgtggtggcacgtgcctgtaatcccagctactcagcaggctgggagactcacttgaacccagtgaggttgcagtgagctgagattgcaccactgcacttcagcctgggagacagagtgagactccatctctcaaaaaaaaaaaaaaaaaagcttatttcagcatgtggttgcaaacatccccagggcacagatcccaagaaacctctcagaagacaggaagtaggccaggcatggtgcctcatgcctgtaaccccagcactttgggaggccaagacggtaggatctgcttgggcccaggagtttcagaccagcctgggcaacatagtaagactctgtctctataaaataaataaataaataaataaataaataattcagcagatgtggtggtgcatgcctgtggacctagctacttgggagggagggtgaggcaggaggatcacctgagcccaggagttcaaggctgcagtgagctaggatcatgccactgcatgccagcctgggcaacagagggagaaaaaaaagaagaatgaagaaggaggaggaggaaaggagaaggagaagaaggaggaggagaacagaaagtggaggaggagaaggaggggaaagagggaggaggaggaggggcaaagaaaaaggaaaggaaagaaagaaaagaaaggaaggaaggaaggaaggagagaggagggggaggaggagggggaggagaaggaaggcaaggaggaggagagggaggaggagggggagggggaggagggggaggaggaagatgggagggggagggggaggagagggaggaggaagatggggagggggaggggaggaagggggaggagagggaggaggaagatggggagggggagaggaggaggggggaggagagggaggaggaagatggggagggggaggggaggagggggagggggagggggaggaggaggaggagaaggcgaaggcgaaggcctagtgcagtgactcacacctgtaatcacaacactttgggaggctgaggcaggagttcaacaccagcctggccagcatggcaaaaccctgtctctactaaaaatacaaaaattagccaggcacagtggtgggcgcctgtaatcccagccactctggaggctgagttaggaaaattgcttgaacccaggaggcgaaggttgcagtgagcccagatcgtgccattgcactgcagcctgggcaaggactccatctcaaaaaaataaagaaagaaaaagaaggccaggtgcgatggctcacgcctgtaatcccagcactttgggaggccgagacaggcagatcacctgaggtcgggagttcgagaccagcctgaccaacgtggagaaactccatctctaccaaaaatacaaaattagccgagtggtggcgcatgcctgtaatcccagctactcgggaggctgaggctgggaattgcttgaaccccggaggcggaggttgcggtgagcagcgatcacgccattgcactccggcctgggcaacaacagcaaaactccatgaaacaaagaaggaaagaaagaagaaaggaaggaaggaaagaaggaaggaaggaaggaaggaagacaggaagagtcactccaaaggagagacaacctttctcacaggtcccttcctcaaagcggtcttcaaggaaccccttgtcccttgctaccgcttcaccttgctttgttatatatacaacatttgtcacaaactggcattaccttgttcttccgtttgtcttttgttttgttttgtttttaaaagccaggttctgagctgccacccaggctggagtgcagtggtgcaatcatggctcactgtagcctccaactcccaggctcaagtgatcctcctgtctcagcctctcaagtagctgggaccacaggtgcacaccatcacacccagctcatttttatttacttatttatttatttttgagacggagtctcactctgttgcccaggctggagtgcagtggtgcaatctcggctcaccacaacctccgcctcctgggttcaatcgattctcctccctcagcctcccgagtagctgggattacaggtgcgtgccactacgcctgactaattcttctatcatttttatttattttttgtagagatgggatctcactatgttgctcaggctgatctcagactcctgggctcaagcgatccacccaccttggtcagcctcctaaactgctgggatttaaggcgtgagccaccccacctggtctcctttattagtttacttagtgtatctctcccacccactaggacagaagctctcagagagtagagagccttgctggtcttgtcctgcaaggaagctgcagatgccgacagacaacaggtgctcttaaagctctactaaatccaaaaggaagttttgtctttggactccctgtggcggtgcccagaaggtccctgacttacaagtttccaaccctagaggtttccagtcgcaggcccagacctggtcaatgtcagggcttttttttttttcttttttcttttgagacggagttttgctcttgttgcccaggctggagggcagtggcacgatctcggctcacggcaacatccgcctcctgggttcaagcgattctcctgcctcagcctcccaagtagctgggattacaggcttgtgccaccacacccagctaatgttttgtatttttagtagagatggggtttcaccatgttggccaggctggactcgaactcctgacctcaggtgaatcacccgagtcggcctcccaaagtgctgagattctaggcatgagccaccgcgcccggccaagtcaaggcttcttttaccctgtcagggagaactctccgtctcccatcctaagtccaggtaggaacatttccatggatggtttggttttgttttgttttgttttgagatggaatcctgttctgtcgcccaggctggagtggggtggtgcaatctcagttcactgtaacctccacctcccaggctcaagcgattctcttgtctcagcctcccaagtagcacaagccaccacacccagctaatttttgtatttttagtagagacagggtttcaccatgttggccaggctggtctcaaacgcctgacctcaggtgatccaccctcctcagcctccgaaagtgctagattacaggtgtaagccactgtgaccagcccaagcctacagcacccggtattcctaggtggtctcccatccaagtactaaccaggtccgacactgcttagcttgcgaggtgagacgaggatcagatgcttttagggtggtatggccatagatacatccaaggtttttcttttcttttctttttttatctttttttttttttttttttttgagatggagtctcactcttcgcccaggctggagtgcagtggcgcaatctcggctcactgcaagctctgcctcctgggttcacgccattctcctgcctcagcctcctgagtagctgggactacaggcgcccgccaccacgccctgctaatttttttgtatttttgtagagactgtgtttcactgtgttagccacgatggtctcgatctcctgacctcgtgatccacccgcctcagcctcccaaagagctgggattacaggcgtgagccactgcacccggcctccaaggtttttcagacggagaacagatcaaggtccacctccacagatttgctcatctaagacccagctcaggcctcccaagtggggcggccagggtgggggtggggaggcagagaagctgggccccccaggacttcggagctgcttgtgccccactccccacctggagggcagaccacagtgttgggcagggacagacaggagggcatccccactctactcaacttccgttggttcagcccagttcccgcccatggccagagcttgaagggagaagccgtcccctccccgtcctctcctcccgcaactccactcccagcacctgaaaactgcagtcacctgtgccttggctgggctttaaggccaggtgactgggccttgcggggttagaaggagcccttccgcacttcctctttttcttttttttcttttggagacagggtccttcttggtggcccaggctggagtgcagtggcatgatcgtagctcgctgcagcctctcaacttcccagattcaggtgatccttccacctcggcctccagagtagctgggactacaggcacacaccaccacacctggctaatttttaaaattttgtttttgtaggttttaaaattttttgtagagatgtggtcccactatattgctcaggctggtttcaaactcctaggcccaaggtatcctcctgcctcggcctcccaaagtgttggattacaggcgtgagtcacagagcccggcctccacattttctcgacagggtccgtaagacctggttcccagaaaggtggccgtagaatggctttgggagttcagcgtccccagctccctcagtttccccagctgccagggtccagccagactgcaaagttgcaaagttctaagacccctgcatctcccgccagccccgagcccaccagggcaaagcagcctaagacggctgtcttcccccaaccctgctgatcgcgcggcgcctggagtagggtcgacctgggcgcgcctgcggcgaggcggggccgagtcgtccgggggcggggcggggcggctccgggtctcctgtccccgcctgccctgactcaccctcgcggcccgcccgggaactctgcgggagtcgcggcagctccgctcccagagacccaggagttgggcccagcgtccctcccggaacggtgagtaggtggctctttgcctctggacaccccacgaggtggcagggtgggggtcgggctgggagtccccgggtctggacaaggggcagagccgctccaggtgcgccggccctgtggccggggcaggccgtcccgacacaccaggagctggggtgggggtgccggccggtgcaaagggaaacctggcccacgaggtgcccgtcctgggagccaggcagacgcggccaagtctcagagtgaagataaacaggctgaagataaacttgactttgggggtctcaaccactttcccctccccttggcatctgggaagacattgacaactcatccccgggagactctcagagctccagaacctaccacttggggtgggttcaaccaagcctgacctctggtgctcttgaacttacacatgtcccagatcttcaagtctgctggcagaggcggcttggaaaaccactcggctgggaatccgcaggcctggggcctgacccaggacgggctacaaagatgccaccctcccccaccctagaccctcagtttctcccttgcataaatggttgaggctcagccggacaccgtgccttacgtctataatcccagcactttgggaggccgaggtgggcaggtcacctgaggtcaggtgtttgagaccagcctggctaacacggtgaaaccccatctctactaaaaatacaaaaattagtggcgtgtccctgtagtcccagctactggggaggctgaggcttgagtactgctcggacccaagaggtggaggttgcagtgagttgagattgggccactgcactccagcctgggcaacagagcgacactccatctcaaaaaaaaaaaaagattgaggccaggcacagtggctcacacctgtaatcccagcactttgggaggctgaggtgggaggattgcttggactcagaagttcaagaccagcctgggcaacatagcgagactccatctctacaaaaaatctaaaagttggctgggcatggtagcacgcacctgtggtcccagctactggggaggctgaggcaggaggatcacttgagcccaggagttcgagactactatgagctatgatcgtgccactgaactccagcctgggtgacagagcaagactctatctctctctctctctctttttttttttttcaagatagagtcttgctctgttgccaggccggagcgcagtggcacgatcttggctcacggcaacctccacctcccaggttcaagcgattctcctgcctcagcctcctgagtagctgggactacaagcatgtggcaccatacccagctaatctttgtatttttagagatggggtttcatcatgttggccaggatggtcttgatctcttgacctcgtgatccacctgcctcaacctctcaaagtgctgggattacaggcgtgatccactgtgtccgtcaggactctatgtctaaaaaaaaaaaaaggttgggccttgttttctacaaaacccctcttagggctgaaaactgctggatgtttcttgcttcttccctgcctcttagcatgggctgtgggtgtggagggtctcactctcccacccttcccccagcaggaactcatcaccacattttttggaggcaagtggcttgaggaggacctgggagggaggaggggtgaggcatgggtggatggagccagggctggtgggagccacatggtctcaggctggaaagccttccagcctggcctgccacaatgcaacaccgctcttaggtgcttttggcaaagatgctgtggtttttttgttgttgtttgttttttgagatagagtcttgctctgttgcccaggctggattgcagtggcgcaatcacggctcactgcaacttccacctcctgggttcaagagattctcctgcttcagccgggcacggtggcgcacgcctgtaatcccagctctttgggaggccgaggcaggcagatcatgagatcaggagattgagaccatcctggctaatacagtgaaaccccgtctctactaaaattacaaaaaattagccgggcgaggtggcgggcgcctgtagtcccagctactcgggaggctgaagcaggagaatggtgtgaacccgggaggcggagcttgcagtgagccgagatcacaccactgcactccagcctgggcgacagagtgagactctgtctcaaaaaaaaaagagattctcctgcttcagcttccccattagctgggattataggtgcccaccaccactccagctaattttgtatttttagtagacatggggttttaccatgttgggctagcctggtctcaaactcctgacctcaaatgatctgcctaccttggcctcccaaagtgttgggattacaggcgtgagccaccgtgcctggcaagatgctgcattttaattagaggctgtctcccaagagggaacagagcagttgcaatcctacaggcaggacctggaggttggatgggtcaggcttcgaatgccgcttggaactgtagaagcttgagcaagttatttctctcccctgagtctggaaagcaaagtctccgacatccacgctgcctgggttgggataaaatgaggcattcagtgtctggtggagaaagctgagcgtatacgtcccatcgttttattttccctggctctgccccaattcttcgagcccctgttcctggaccttcccaccagccctgctcagacaaagtgggggcctattttatgtctgtggaaatttaatggcaggtttgtgaggatcaagtttgagtcatggagacagataatgatagcccctgtggctgccccccggtcccctgagtgttgctgccttcttgtctgcgattgtgcacctgggatggctattggtggagcttacaccagggtggcaaggacaggaagttggtccctgctcgggtgtgtgtgtgtgtgtgtgtgtttgtgtgtgtgtgtgtgtgttgtgtgatttcttctgcagcctccagagtcaggagtttttgttttgttttgtttttttgagacggagtctcgctctgtcgcccaggctggagtgcagtggcgagatcttggctcactgcagcttctgtctcccgagtttaagcaattctcctgcctcactctcctgagtagctgggattacaggcatccaccaccatgcctggctaattgtttttgtatttttagtagagacgaggtttcaccatgttggccaggctggtctggaactcctgacctcaaattatccgcctaccttggcctcccaaagtgctgggattacaggcgagagccaccgcgcccggccccagtcagtagtgttttgcttgctgtgtttgagatagggtcttgcccaggctggttcatggctcactgcagcctctaactcctgggttcaagcaatcctcccacctcagtcttccaagtagctgggactacaggcatgcaccaccacacctggcaagattttagattttttttttttttttgagacggagtctcgctctgtcgcccaggctggagtacagttgtgcaatcttggctcactgcaggctctgcctcccaggttcacgccattctcctgcctcagcctcccaagtagctgggactacaggcgtctgccactatgcccggctaattttttgtatttttagtagagacggggtttcgccgcattagccaggatggtctcaatctcctgacctcgtgatccacccacctcggcctcccaaagtgctgggattacaggcgtgagccaccgcacccggcccaaatttttagatttttttgtagaaatggggtctgactatgttgtcctggctgctcaaactcctgggctcaagcaatcctcctgcctcagcctcccaaagtgctggaattacaggcctgagccactgcacccagcctggggtcagcattcttaggtaaagcaactgagcagtgtccctgcaggatccttggaggactcaatggatggccggaaccaaaacaggacgtgagggtccctggtgctgggtccctccgaagctcagtgtgtgtacttggactttataccctcgtgcacaaatatgcatgacccaaaatgaccccaagcgtccattttggtgggtgcaatgtacatattcttcccctggggacagttgagctatcctggtatgtttctaccagattacatactggtgacccaggcagactgggatatttgtagtcgggtttcttttctcttctcttctcttttttagagacagggtcttgctctgtcgcccaggctggaatgcagtagtgcaatcttggctgactgcaacctccgcctcccgggttcaaggggttttcgtgcctcagcctcccgagtaaccgggactacaggcaccctccaccatgactggctgttttgtatttttatttttattttgttttagttttgagacagagtcttgcactattgtctgggctagagtgcagtggcgcaatctcagctcactgcaacctctgcctcccaggttcaagcgatcctcctgcctcagcctccctagtagctgggattacaggcacctgccaccacgcccagctaattttttgtatttttagtagagacggggtttcatcacgttggccaggctggtccctaactcctgaccttgtgatttgcctgcctcggcctcccaaagtgctgggattacaggcgtgagccaccgcacctggctaatttttgtatttttaatagagacggagtttcaccatgttggccaggctggtctcgaactcctaacctcaagtgatctgcccacctcggcctcccaaagtatacttggctttttgcttagggcagggagtgtgaatgagcatgagggccaggccatggtgcgaaggaccctgtgctctgggcacccccttgcatggatctgggtctgggtgagtcactgcctgagtcagggaacccatgacttttttttttttttttcccgagacagagtctcgctccgtctcccaggctagattgcagtggcacgatctcagctcaccacaacctccgcttcccgggttcaagcgattctcctgcctagctgggactacaggttcatgccaccatgcccggctaatttttgtatttttagaagagacggggtttcaccatgctggccaggctggtttcgaactcctgaccttgtgatccgcctgccttggcctcccaaagtgctgggattacagacgtgagccactgcgcctggcccaacctatgacattttacacttgcatggtgagtccccgtgtgggcaggctgtacccacacccttgcctgcctatctgattccccagactgaagtgggggcctctgagggggtaaaaggatgtggtctttcgggactgcttggcctttagcttggtgggtggagcctgtatcctaccttgttttaacccaggagtcaccccaaaatatgggggggacacaaactgaaaagggaggctcagacatgtcagaaccattggctgagtcgtgggtcaggggaccagggtttccctagattcttcctggggagatggatggggagccagagataactccctgatgggcagatgccctccttcttggcccaactcctgtcccgttacagattatctttgtcttttgttttgtttgtttgagatggagtctcactctgtcacccaggctggagtgcagtggcacggtctcacttcactgccacctctgcctccccggatcaagaccctcccacctcagcctccagagtagctaggattacaggtgtgtgtcaccacacctggttaattttttgtgtatttttagtagactctgggtttcaccatgttggcctcactggtctcgaactcctaacctcaagtgatccacctgcctcagcttcccatagtgctgggattacaggcatgagccaccgcgcccagccccagttacagattatctatctggacaaggacaggaggctcccaggagtgggggaacttggatgttggcagaagtgggctggtctaaggttccccaccttccttgttccacctccagcctctggggaagtaggtacctgcctgggagagtgacatctcagctcatgccccacgccccagtgtgatttgtggctggcctgtctgtatctgtaatagtgatagcttggtctaaaaggagaccctgggaacagacagagtgggccggccaggagcctgacagcacagccctagcctggtcgcagatgtcacctgacaactttccatttgcaaatcctccttcctcctcggacatccggacaccccattgccccctctcagagcccaggtctctggtttctgcctgtgattctgggctgtagcccctttagaaactcaggtgtcctggtcacctcctacccccagggctgactagccttcagcttggcagtccctgcccctggggccctagtaaccagagccaggctccagccggcttttccggttagaggttggaggtggtgcccagagtgcccctggagggggtggaggggcctacgccccggaagtcctgagccttggaacgctttcaggcctggtggcggtgggagccggggctggcccagacgctgagtgtctgcagtcagggagcatcgaggcagatgttttcaggccttggtgtcaggggtgggagagggatgcctcgttttggggagggggccacccgaggaggctggagggcggcggccctgtggactatccctcatgtgctcttcgaggtcagacaagtcagatcaggtgcaggggtgcccagaggggaacagtggccgcttggttctgggcaggtggtgacgtctgcatggagggtgactaaggccaggctaagagggaagtgggggcacacactttggtggtttggacaagtttgggcagggagggtcacaggcctgcctgtgtccggctcctcggaggaccccctgcagagcctcccatcctgagggtctctctctacaccccccgtctcgtcccgtcccacaggcagcatgatcccagtggccgagttcaagcagttcacggaacagcagcctgcgttcaaggtgctcaaaccctggtgggacgtgctggccgagtacctcaccgtggccatgctcatgattggggtctttggctgcaccctccaggtgaggccctcccctggcaagggggtgtgaccagaggggcggggcaggtgtctggggaagtcgggaagccttctcatcacccaagaaagagaggaaactgaagacagagccccactcaaaggccaatccagaccccttatcttccttacctccatagccaggagcaccggagtccccacattgctatgccattccatatctttttttcttttttgagacggagtctcactctgtcacccaggctagagtacagtggcatgatctcagctccctgcaacatctgcctcccgggtacaagcggttctcctgcctcagcctcctgagtagctgggattacaggcgcccaccaccacgcctggctaattttggtagttttttagtagagatggggtttcaccatgttagccaggctggtctcgaactcctgacctcaagtgacctgcctgcctgggcctcccaaagtgttgggattacaggcctgaggcactgcacctgaccctttctttttttttcttttttttttttttctttttggctaaaaagagacaggggccgggcatggtggctcacacctgtaatcccagcactttgggaggccaaggtgggagtatcacttaaggccagaagtttgagaccagcctggccaacacggtgaaaacccgtccttactaaagacacaaatattagccaggcatggtggtggacacctgtaatcccagctacttggaaggctgaggcaggaaaattgcttgaacctgggaggtggaggttgcagtgagccgagatcatgccactgcactccagcctgggtgacagaacgagactccatcttaaaaaaaataaaataaaataattgaaaattaaaataaagaaacacggtctcattctgtcatccaggttggagtgcagtggcatgatcacagctcactgcagccttgaactcctggactcaagtgatcttcccgcctcagcctccagagtagctgggattacaggcacacaccaccacgtccagctaatttttaaatttcttgttgacacaggggtcttgctatgttgcccaggcttgtctcggactccgggcctcaagccatcctcccacctcggcctcccaaagtgctgggattacaggtgtgagccactgtgtccagccccatattttcacaatgctcagttttatccctagaatctggaaaggactgcagttgctatatgagtttgttacttctgttgtaacaaagtagcagggattgagtggcttaaataaccagaaatgtttcctcttctgggtctggttctggaggccagaagtctgagatcaaggcgtcagttgtcagtgagggagaatcttccaagcttccctcctagatttttgcagctccaagagttccttggcttgtagatgacattctcccagtatttttctttttctttttcttttttttttagacagagtctccctctgtcgcccaggctggcatgcagtggtgcgatctcggctcactgcaacctccgcctcccgggttccaacaattctcctggcttagcctcccaagtagctgggattacaggcgtgtgccaccacgcccggctaatatttttttgtatttttagtagagacgtggtttcagtatgttggccaggctggtcttgaactcctgacctcgtgatcaggatcagcctgcctctgtctcccaaagtgctgggattacaggcatgagccactgcgcctggtcgagacagttttttttttttttttttaagcaagctctgtcacctaggctggagtgcagtggcgcaataatagctcactgtaaccttgtactcctggcctcaagcaatcctcctctaccacccccgcttggccccccctcccactgcctcccaaatcactgggattacaagcctgagccaccgcacccagcctctccctgtatcctcacgtcatcttctgtctttgtgtctgtctctgtgtctatgtttcccctttctctaaggcgcagtcatactgggcccaccctactggctttgtcttgactacctctgcaaagaccctattaccaaacaggagccgcctgacccagctcaaataataccacattctaaggattcggagttgggacttcaacatcttttgtggggacacgattcaacccagctccttttctcagacaaagaccagtgctttgtcagttgtggtggctcattcctgtaatcccagcactttgggaagctgaggcaggggatcacttgaggccaggagttcgagagcagcctggccaacatggtgaaaccccatctctactaaaaatacaaaaattagctaggcgtggtagtgcgtgcttgtagccccggctactcagcaggctgaggcaggagaattgcttgaaccaggaggggaaggttgcaatgagccaagattgcaccactgcacacagcctgacagagcgagactcttgtctcaaaaaaaaaaaccaaaaaaaaaaaaaacagtgcttagaggtttagcaaaactcttccaaaatcacagctggctggcaacagtcagagatggggggtgcggggggtctcccaccttcagcctgctttttccccatccccctcattttctctcttttttaaattaatttatttttgagacagaggctcactctgtcacccaggctggagtacaatggcgcgatctcggctcactgcaacctccatcttccgggttcaagcgattctcctgcctcagcctcccgagtagctgggattacaggtgcccaccaccatgcccggctaattttgtatttttagtagagacagggtttcaccacgttggccaggctggtctcgaactcctgacctaaagtgatccactcgccttggcctcccaaagtgctaggattacagccctcattctcttttgctcctcaggtgacacaggacaagatcatctgtctacccaatcatgagctccaggagaacttatcagaggccccgtgccagcaattgctgcctcgggggatccctgagcagattggggccctgcaggaggttaaaggccttaagaacaatttggacctgcagcaatacagctttattaaccagctgtgttatgagacggccctgcactggtatgccaagtacttcccttacctcgtggtcattcacacactcatcttcatggtctgcaccagtttctggttcaagttccctggcaccagctccaagattgaacacttcatctccatcctgggcaagtgtttcgactctccatggaccaccagggccctatccgaggtctccggggagaaccagaagggcccagcagccaccgaacgggctgcggccaccatagtggccatggcagggaccgggccggggaaggcaggggagggtgagaaggagaaagtgctggcggaaccggagaaggtggtgaccgagcctccagttgtcaccctgttggacaagaaggagggtgagcaagccaaagccctgtttgagaaggtgaagaagttccgcatgcacgtggaagagggcgacatcctgtacaccatgtacatccgacagacggtgctgaaagtgtgtaagttcctggccatcctggtctacaacctggtctatgtggagaagatcagtttcctggtggcctgtagggtggagacgtcagaggtcacgggctacgccagcttctgctgcaaccacaccaaggcccacctcttctccaagctggccttctgttacatctcctttgtgtgcatctacggacttacctgcatctacacgctctactggctcttccaccggcccctcaaggagtactccttccgttccgtgcgggaggagactggcatgggggacattcctgacgtcaagaatgacttcgccttcatgctgcacctcatcgatcagtacgactccctctactccaagcgcttcgccgtcttcctgtccgaggtcagcgaaagccgtctaaagcagctcaatctcaaccacgagtggacgcccgagaagcttcgacagaagctgcagcgcaatgccgcgggccggctggagctggccctctgcatgctgccgggtctgcccgacaccgtctttgagctcagtgaggtggagtcactcaggctggaggccatctgcgatatcaccttccccccggggctgtcacagctggtgcacttgcaggagctcagcttgctccactcgcccgccaggctacccttctccttgcaggtcttcctgcgggaccacctgaaggtgatgcgcgtcaaatgcgaggagctccgcgaggtgccgctttgggtgtttgggctgcggggcttggaggagctgcacctggaggggcttttcccccaggagctagctcgggcagccaccctggagagcctccgggagctgaagcagctcaaggtgttgtccctccggagcaacgccgggaaggtgccagccagtgtgaccgacgttgctggccacctgcagaggctcagcctgcacaacgatggggcccgtctggttgccctgaacagcctcaagaagctggcggcattgcgggagctggagctggtggcctgcgggctggagcgcatcccccatgcagtgttcagcctgggtgcgctgcaggaacttgacctcaaggacaaccacctgcgctccatcgaggaaatcctcagcttccagcactgccggaagctggtcacgctcaggctgtggcacaaccagatcgcctacgtccctgagcacgtgcggaagctcaggagcctggagcagctctacctcagctacaacaagctggagaccctgccctcccagctcggcctgtgctcaggcctccgtctgctggatgtgtcccacaatgggctacactccctgccacccgaggtgggcctcctgcagaacctacagcacctggccctctcctacaatgccctggaggccctgcccgaagagctcttcttctgccgcaagctgcggacgttgcttctgggcgacaaccagctgagccagctctcgccccacgtgggtgccctcagagccctcagccgcctggagctcaaaggcaaccgcttagaggcgctgccagaagaacttggcaactgtggggggctcaagaaggcggggctcctggtggaagacacgctttaccagggtctgccggcagaagtgcgggacaagatggaggaggaatgaagctggggtggggccgttttaggtagagccttaaaaatgcttctgccctggaatctcaaccattgtcttccaagataggaagccaagtgggtccaggccaggagatggggggggcgggggcagctgtgtcatctttctggggcccaggaggatctgggctggtttgtctggggagacagacaggatgttgtggagctggggtggaacctggtatggagggattaactcagtcatggcattctccgaccaaaaccacacctgtgtctctggcaggctggctggccttgctcccatccctagaactgctgcctctccctggatattccagctcaattagtgccacatatgggggaaacgacacatcccagtgggatttccaacactccccctccccatgcaacaaagcaacttacttctggagttctctcccaaggagaggacacagacacagttgtttgctgtgttatatgttagctccgaacaatggttctcatttggctaagcatcaaaatcacctagggagtcggtgcaaaacaaaatatcccagtcccctcccctgaaacactgactcaggaggtttggttgggggccaggagtctgttcctaaatattccaggtagttctggtgcaggtaagtggccctgagacagtatgttgggaaatgctgacgtaaaggtatcagggccgggcgctgtggctcatgactataatcccagctgtttgagaggccaatgcaggaggatggttgagctcaggagttcgagatcagcctgggtaacatagcgagaccccacctctgccaaaaaaaaaaaaaatagggtatccaaatatctagattctgatcccttttgaggtcctagaccctttgagaaactgatgaagccaggcacctccttcctcaggaaaatgctggtgtacaaatacacacaaagctcttcaggcagctgatagatttcccccagagagctattcaaggacttcctaaggtgggtggactgcagggttaggacacctgctatagaggtgacatttttccaaggacaagcagggactttggtcttgactgttctctgggtgcttaataaataatactaattatgcaagttctagttttgatctcttatgtgcactcctgtcattgtctaacaccgtccattagggccagacatagtggctcatgcttgtaatcccagcgctttgggaggctcaggtgggaggatcgcttgagctcaagagcttgagaccaaactgggcaacatagtgagatctcatctctacaaaaacatacaaaaaaaagttggccaggtgtgctgatgtgtgcctgaggtcccagctactaggcaagcagaggcaggaggattgcttgagcccaggacccaggaggttgaggctgcagtgagctgtgatcacaccactccactccagcctgagcaacagaacaagaccctgtttttctttcttttttttttttttgagacggagtctggctctgtcacccaggctggagtgcagtggcgcaatcttggctcactgcaacctccgcctcctgggttcaagcaattctctgcctcagcctcccaagtagctggaattacaggcgcctgccaccatgcccggctaattttcgtatttctagtagacacggggtttcaccatcttggccaggctggtcctctcctgacttcgtgatccatccgcctcggcctcccaaagtgctgggattacaggcgtgaaccaccatgcccgtaaccttttatttcatgtgaccaagtaacacccgtgtgccagaatcaaggatgagtctcatgttctcagagcagaggcacagaaggctgcctggaagacggaaaggtaaagacctcagctataactctacacttgtgtgtgctccacccacaaatcgtcaccagaggagttccgacaagccggtaactctcatcccaaagtgttccctcgttggaccagaagctggaagggcacttggcagagtctgcctggccctggccacctcccgggtgtccgcaaaatcagaacttccttctcgcatctaagagcagagggaagccgctcttggggggatccctgggttccagatgggacatttccccagcacccgtcggaccacttaaaggagtggtttaggctgccgggggcccaagcactggcacctaaccccagcgcccctcctcagataggaattctccacgtccaggcgctgggctcacgttccgggtgcgagagagataaggggggtgtcttgaggttctatgtgggtctggccaacaactctggccttgaccttggccccgtcgccgagggcaggggtcacaccgctgggttcccatggccgtcccctcccccctggcttcggccaactctgagcctgctggggctggcaagaagggaaagggctctcgacggagcctaattacggtgaggaggcggcaccccgctgccagcaggaggctaggaggtaattaagcacaagaggaatcctaataaagcaccatcagtgaggaaggcattccgaagggacgcccaagccgaccgtgaaaagcgaggaggctgaggctgcaccgccgtggagaccagggatcgactgccgctttgggaacgaggttccaggaatgcgcatgcgcaaaagccacgcgggcgaacacggcttcgcctcgctaagcatgcgcgccgttttccccgcccaccgtcctcagaagaatggtgtttcctcgcagcgcctctctcaggagcgatcgggaattggcgcatgcgcactacggtggtggtggcgacgaaggcgggggttgcacgttgcctgcctcgagctctaggtggcgtcatccttcgggctgagccgaagcacgcacgcgcggaggttcgcacgcggagaagggcgggtgcgcgccgcgggcatgcgcggtgcggggcgagacggcggctcgacggggtcatccgggcgcaggcgcagtgcggtgtttgtctgccggactgacgggcggccgggcggtgcgcggcggcggtggcggcggggaagatggcggcgtcctccctggaacagaagctgtcccgcctggaagcaaagctgaagcaggagaaccgggaggcccggcggaggatcgacctcaacctggatatcagcccccagcggcccaggcccagtaagcacggcggcgtgggggagggggcgggcgggcggggcggggcgcgcgccgcgggaggccccgcccccaccacaaggccccgcccccgcttccggggcgctcgctctcctctccgccccccccgctgcgggctcgcggggcgagggtcacggtgacccggggggcgtggagccggcgagctccggggggttcgcaccctcagggcttgggagcccagttcccggacccaggcgaggcccccagctgatgacccgcccccatcgccgtgatcctctgggtcgggcttccccgactccacgcgacagtgaccacatccaggtcgccccgaaaacacagacacgtccctgttgacctgatgctaccactctcgtcatctcagggactgtctggcgcccccctcccccggcctgggggcttgtcagccccgtgcagcgacgatctacgcacacgcgcacgcctggctcggggacacctgaggttacttgaccacatagagcccctccccatctcttctgacccgaggattctccctctcgctctccctgtgaccgtgtctgaggtggggggacgggagggggtcccttctccccctcttggcgacagtgaccatggcattgggctcagcagaccccctcccacatacaccaggccccgcaaatccctgtgaccagtttcactgccaccatcttggtgagcgtgtggtgtctgacctccagaaatgcacatcgacccccagccagcccggtgactttgtcacctgtgttcaagtgatggctccccttcccttcacacccacacccacctgacctggggacacctggggccagtgtgactctaggcctgctcccgccgcgccccagcatacatccacctgctttctgatcagtcccaccacctcggtacctacctccctgacaccttgtcatcctagatcagtacctctcgcttcacacacacctggcctgggaacactgaccatatctagtctcccggctttttccccaagatcctggtctctaaatcctctgggctggaggaaattagattttcaaaccctgtgaacaccacccctgacccatgatcctttttgtgtctttcttgacccagtaaaattctctcttgtctcctctgatgtgaccttcgtagtttatttagttctctctatggagtcattatggcaggcgagaaaggtacccccgtatctgggcaccccacccattccctggtcacccagcctgaccttcacagcctgacaccctcctgtccctccctctcctgacctgagtcagcgtgggttcctccttggggagtctcttgggggtccagagaaatcatggaggtggggattctggtgcaggacactgcctgagacaagaagcccagccaagacacgggtccctgctagcccctgggggccgccctccctggcccctgagtggatgagacagggttgagtccaggatcccgggtgccttcaggggtggccgttcccatgcagagctaggaggccggtggcaggcaggcccccgaggagtcccctccaggcgtctctgtctgtgtcaactccatcccatcctccccgccctccccatctctgtcggttcctagccatctctgcagttcggtgcctccccctcctcctcgtttatgatttgatttcttttcttttggacgaatcagtcgtttctgttgtgatttatcgtggtgttgtttttttcttccttttccccatccagttattgtgatcactctaagccctgctcctgccccgtcccaacgagcaggtaccagcctttttatcatcgctgcttggacatctgcaccattgacctaaccgctgccccggccgcagaatggcgtcccccagcccccatgctctgtgtgtgtccccatgtcccttcccctcactctcactttctctctcactccactcaagcagcggtcagcccagcccagcctcctctgcgtcctccctcctcctccccctcccttactcccagctccactttggactccctggaggaggaggtgggctcccccactgaatgggagtctgtggcctccgggggtggggggggtgcacgcctgtgtgtgtgtaactgagagaacgagaaagttgggcctggtgggtgggtggcctgtgcctatggatctctctcaacaactaggtgaacacatagcaccccccgggttccataccagccctgggcgccagggacacagcagtgaatagaacagatggagcccctctcctctgtagcggggggctgcaataggggggcccactggacaaggagcacattcccaccagagagaacattctagctgggtgagcggccctgcagggggccagcctgggggaacctctggagacggtgggaattgaacaaagcctctggggaggccaggcacggtggctcacacctgtgatcccaacactcggggaggttgaggctacagggagccatgatcacaccactgcaccccagcctgggtgacagcgagatcctgtctcaaaaatttaaaaactgggccaggcgcagtggctcatgcctgtaatttcagtactttgggaggccaaggagggtggatcacttgaggtcaggagttcgagaccagcctggccaacatggtgaaaccctgtctgcattaaaaatactagagattaggccaggcacagtgactcacacctgtaattccagcactttgggagaccgaggcgggtggctcacctgaggtcgggagttcgagaccaccctgaccaacatagagaaaccccgtctccactaaaaatacaaaattagccgggcatggtggcacatacctgtaatcccagctactcgggaggctgtaatcctagctactcgggaggctgaggcaggagaaccgcttgaacccgggaggcggagattgcagtgagctgagatcgcaccattgcacttcagcctgggcaacaagagcaaaactccatctcaaaaaaaaaaaaaacataaaagattaggtggaggttgcagtgagctgagatcgcgccactgcattccagcctgggcaacagagcaagactccgtctcaaaaaaaaaaaaaatttaaaaagcgtcttgaaggagttggggggggagagaagacagggccgccagggctctgagcgcagcgccagcctgtgtggggcatgcaggctgtgccccacgcctgtgttgggagagagagtagatggggtgcctggccctgtgagtggttgtgagtatgtgtgtccgagggcaagggggactctgtcccggctgcatgggtgttaggtccacggcatgccccgggtgtgtgttgtgcgtgcgtgcacttgcacggcatgtgcgtgcatgttgacatggcagccggtgcacctgtggctcctgtcggcagacacgtgccctccagcctctcgctctctctcatccgttctctttctcatcctcaccctcttgctctcactccaccctcctgagctgccatgtggccatcaccacctctgtggcctctgttctcagggcctttgtgtacctccttcccccagtgcctacctgaaccctcccttccatccccccatgctccagtctgtggtccggcagcctcctccccaggctccggggccaccctcggaaggcctggtgggctctgtcagggaaggggcccacaggactcctcgagggctgtggtcgtcaaccgctgagtgcagggtgtgagcgggactcggatactctctgagggcgggaactaggcagtgtctcaagagatgccaggtgcacaggggttgggggctgggttggggggagcacaggccctcgggagccagaaggggactggggctgtggctcaggccatggacagagcagaggcgcagggacctgaagaagcagagggagaagcctggccaacatagcgagaccccatctctactcaaaagacaaaaattagctgggtgtggtggcgtgtacctataatcccagctactcaggaggctgaggcaggagaatcacttgaacctgggagggggatgttgcagtgagttgagatcacgccactgcactccagcctgggtgacagagcgagaacctatctcaaaaaaaaaaaaaaacagtgggaggtgacgtggtgctgcagaggcggcagtggccaggacagcgggaggggcacgggaggtgaggcctctaggccagtcatgaacgctgggcctggctgtgtcccaaggtccccagagcccttcccctgctcctgcctggtcctccaggaggggagctagggggcacagctcctgcaggggctggcaggaccagataggggcaatgctgggcctcctgcattgggactgaggcgtcttcctgcccctcctactggctgagatcagggtcctgggcacacgggagggacggggtttagctgccagcatggagcgggtttgtctgttcatattagtccctgggcaccagtcaccaggagcctgcagaactgtggggagaaaaggtggacgaggcaggaggaaaagaggggagaggggcttgttggctgagggctttggagagcggcaggccccagctcctgtgggaggggcaccttggtaggtgtgtgtagccgttgtcagggcctctaggatgtgacgtgtcaggattggctcctctggaggccacgttagcatcccggcctctgttcctgcaccctgttgccagcccagccagggagaccctagctcctccgggaagctgccctcctgtcccaggcccctctctggcctgtctctgcagcgcctcctctgggcacctgggccctagtcttggttcctgtctgtctgtctgtctcctgccctcccacccctaatgccgcctgcccaccccagggtgcctgctgcctgcccgccgcctgcccacccgctgtagcatgcccgagctgcccgcatgcaggctgctggatgagccaacccccgcctggcccagcattggccccacctggtcccgccagcccctgcaggagctgtgcccccgagctctcctcccagaggatgcaggccccctgaggtcctgtcctgcccccatgggccccagctctgcaggccaggccaggaggccctcatgtcagcccactggcccgaggggggccctccctgaccccggaacagaagatagggcaaggcagcctgaagcctgggtctcgtgcccgctgcctccccagcgtggccctgctcgctcttgtctgggagccaacttcagtgctaccagcagagccacagcctgggccagccctggcaggcactccgccctggcctatccatcctgtgggtgctgtggccctgggcctgcttcctgggcagaagtgggaggaagtgcacacacctgtcagggaggccccctggccgagggacacctcaggtccccatctcgtttctccgtcagcgtagacttggggctccctctcccctgctagcctcctccatctctttccaggtcaggggatgagacaagggaccctgagaacagtctggggtgggagggagaccccagctcctccagcccagcagggcagggggctgtgccagcctagctcgggaaacccaggaggggaaggtgagggtcccgacccctccctggagtgccagatgtggagctgacaccagctgggcgctgacccccctccctgccactggttctcacccccctagccctgcagctcccgctggccaacgatgggggcagccgctcgccatcctcagagagctccccgcagcaccccacgccccccgcccggccccgccacatgctggggctcccgtcaaccctgttcacaccccgcagcatggagaggtgagccaggggcccagcagggttgggtgggaagcagcattgaggggccaccgtgccagccctgggaggagggtggttaaaccggtgggaaccccggtatgggggactggggtggccaacctaaggtcaggacccacctccaccggcacctgctccatgtccccagcattgagattgaccagaagctgcaggagatcatgaagcagacgggctacctgaccatcgggggccaggtaccaccttcactgtggcggggagagggaggaggcccagccaggctggacccatcctgggagcgccagtggggggcagggggcggtggcagaggccccagggaccctccaaccctccctctcctcccagcgctaccaggcagaaatcaacgacctggagaacttgggcgagatgggcagcggcacctgcggccaggtgtggaagatgcgcttccggaagaccggccacgtcattgccgttaaggtgagccttggcggctaccccggctgcgccccacaccccaggccggtgctgaggctccctcctgtccctgcctgtgcagcaaatgcggcgctccgggaacaaggaggagaacaagcgcatcctcatggacctggatgtggtgctgaagagccacgactgcccctacatcgtgcagtgctttgggacgttcatcaccaacgtgagtacctggccgcgccctgcagcgtctcctcctccctcacccctgccccttcctagggagcagagcctctggggggtgggccggaagacacagctcccccgggtgcccctctccctgcagacggacgtcttcatcgccatggagctcatgggcacctgcgctgagaagctcaagaagcggatgcagggccccatccccgagcgcattctgggcaagatgacagtggcggtgagtgaccaggcggggcttgcactgggcaggatgacagaggcggtgagtgaccaggcggggcgtgcactgggcaagatgacagtggcggtgagtggccaggtggggcgtgcaccgggcaggtggccttgggtctgtgccccctgccacatgcacccccctctgcgtgcctgcagattgtgaaggcgctgtactacctgaaggagaagcacggtgtcatccaccgcgacgtcaagccctccaacatcctgctggacgagcggggccagatcaagctctgcgacttcggcatcagcggccgcctggtggactccaaagccaagacgcggagcgccggctgtgccgcctacatggcagtgagtgggggccccccagcgggggagggggtgggggctgggaggccggccccagccttggagatacgtcttctcctcccccccctgcagcccgagcgcattgaccccccagaccccaccaagccggactatgacatccgggccgacgtatggagcctgggcatctcgttggtgagttggggccctcccctgttctccagccaggagtgagggcttctgggggactcggagggaggagaacataaacctgtccagccctgcccgtctccctcccaggtggagctggcaacaggacagtttccctacaagaactgcaagacggactttgaggtcctcaccaaagtcctacaggaagagcccccgcttctgcccggacacatgggcttctcgggggacttccagtccttcgtcaaagactggtgagaacctccctccacttgggaggtcagggacagcccgctgctctgggcagctggggaggcaatggcaggaggggaatggaggccgcaccctgggatgggcggatgcgactgtgggcgggctcctggctggcggctgccacaggagctggagctggtgcccagggagccatgagctgggtttggacctagcctgaggggacagccagccctgtggcatttggcggggtggctgttggagattgtgagcacgcttctgcaacaagcacagctacaagttcaggagggccatgttcgattctctcaggggagccccacccacctttctgggggacctcagccagctctggccccccaagccaggcccttgccacctggccctaggccaggaggctccgggactcacagttgctccccgctgtcagccggggtcctgaggacatccacagctccttcccccacacacatcttggggacccctggccccttggggagggcctgagcacaggggtggggccggcatcccctcctccctcgttctcacatctgtcttcccttctcttgctctagccttactaaagatcacaggaagagaccaaagtataataagctacttgtgagtacctgagccctcccagtccccgtcctgtccctgcggaggcgcgaggccaggagggaagaccgtctcctcctaagccccaccccctcgggcccacaggaacacagcttcatcaagcgctacgagacgctggaggtggacgtggcgtcctggttcaaggatgtcatggcgaagactgagtcaccgcggactagcggcgtcctgagccagccccacctgcccttcttcaggtagctgcttggcggcggccagccccacagggggccaggggcatggccacaggcccccctccccacttggccacccagctgcctgccaggggagacctgggacctggacggccacctaggactgaggacagagagtggggggtgcccacccaccccccccgccccgggcctaccaagcccccgcccttcccaccccggggtcagccggccgtgtgcgtcccccgacagacactgtgaacggaagacagcaggccgcgatcagagtcgctgttcattcagccgcagcctctgggccggggcggcccccaggggccaggagagagccctggagtcccgcagccaccatgcacgctcccagcgtgctgtgtccttcgccactcccacgcgcccgttcctcttccgtcgccctctgtcccctgctctacctctctgtccttgtctggctctcccgtcaccctccctgcctctgtctctcttctggcctgagcctgggcccagccacctcctgacgggtcccctgggtctgcataggtctcccatggcgcaatgagtcagtggcccccagccaggcagtgtgggcattgccactgcggctggacggggctgcgcgctcgcgctctctctctctctctctctctctctttgatctcagggggtcctttttggagtttattgtattttattgtacttggtggggtgtttggggtgggggcggaggagagcttgttctcgtggggttgtcggtaccttcagaaacttttaccaaagtcacgattagctgcttgtggtggggccccaaccgccctcgggcactggggagctgggctggggctgctgctctggggtctccgggggccacagcttggggtgagttgaagacctcaggggatgtggaggggtctgcggggccctggccgcacaggatggccttcagggaaggtggtcttggggcatggtgcagagcaggtgaccggagggaatcggtgacggagcggggccaagggaggggtccggagggagtcagggatggagggcagagggagtggatgtgggggtttgaggacgtgtgacaagctccagcaggggtgggggccgggctgagggtgggggtgcgaggtggtcactcccatcgtgcccctggccgtccctccactcacccacacctggcccagtccacgttgaggtccaggactgggaaggaccgggtgagtgcaccggggacccaggccaggtgccccccggagcctgctggggtggccagagcaggagggggtgtgtttcctttttgtgggtgttgcatgcaaatcaagtggacaagaaaaaataacaaaacaaaaaacaagaaaaaaaaaacacaaaaccccgtaaaatcacaaagaaaatccaacaccaaaggcgcagaagccggctggccgtggtgggggcagcgtaggcgtagcatccctctcctctcacttagcctgttgactcttgttattatcatgatattcacaaaacgccgcatgtttaaaaagtcatagatgtcatcttctctctgcccccagggaggaaagccaccttctcttgccccttggcccctttgtcaggggccaggggtctgccgggtgggggtgccaacaggcctggccctttcctcccctgcatccagccatgggggcctctgcgattgccggaaggttgcatggctggtcccagggccagcacaggcccgaggccgggctgcctggttttatttttatttaactttattttctgttttatgagtgtgtgtccgcccacccccacccccttcagtgttaagtggggagccctgggggagtctctcctgcctcccagcctctcccaagacctcccccctcgtcaccagccatccctctggaccaggcagagggcggaccgggtgggcaggggcctgagggtggctcgggccagcccaccagccaatggacccctcctcaggccgccagtgtcgccctgcccctttttaaaacaaaatgccctcgtttgtaaacccttagacgcttgagaataaaccccttccttttcttccaccgagtctgtggtgtgtcatgggcctggcagggcgaggtgggaagggggtggttgcggggggaggtttctgcattgaggggagactgaggcaggtttgggagctagacgggaggtgtttgtagtgacttgccgatgggtatcaagcagctggtgtaagggaccccctgcccccagtggccacaggtcgggcagcagaggatcccttaatcccctcaggccttgggcattggctctggtgtcagcccctcagtctgccacccccgctccctgcctccctccttgccaaggacagggccgcctgcccacgtgcgggacctgggtgcagcccagctggtgtctgctctggccccaaacactccgacctcagctggtccagcatgctgggcaccgtgctgctgctggccctgctcccagggatcaccaccttacccagcgggccacctggtatgtatgggcagggaggtgacgggtctgtcatgcttctatccctgtttcaccctctttattttttttgagatggagtcttgctctgccacgcaggctggagtgcagtggcgcaatctccactcaccgcaacctccgcctccccggttcaagtgattctcctgcctcagcctcctgagtagctgggactacaggcacgcaccaccacgcctggctaattgttgtatttttagtagagacagcgtttccccatgttggccaggctggtctcgaactcctgacctcaggcgatccgcccgcctcgaacttttcaaagtgctgggattacaggtgtgagccaccgcgccccaccgatgtcactctctttcaactagacctttggtggtggtcctcatgggggtggggacagggcaggggagtggggtggggtctctgtcccccatcccaagggtggctcacatccccacttcggcaaagctccctgcagccacggagagggccagagttgtgggagggggccagtctacccaggtgctcttcagaagtgggtgtggtgtgcggatggacaagggggctcatgcctgtaatcccagcacttaagagaggctgaggtgagaggatcgcttgaagccaggagttccagaccagcctgggcaacatagaccccgtatggccgtggtagcgagtggctgtggtcatagctactcgagaggctgaagcaggaggatggctggagcccaggaggtggaggctgcagtgagctgtattcgcaccactgcactccagcctgggcgacagagggagaccctgtctcagaaaacaagaaaaatggatgtgcaggcaatctttcgtatttggagattagccgttttaccaggaccccgctcagcacctgaaggcagacatcagcgtgtgtttaggggcacgaagaggggaggggtcccatggctgcctcagcctggacaagtggaagcgtctcagatcttggtggcctggctgggctttggctgtgcccaggagagcctcttgggagggtatcctcttcacttcccttcctcgttggtgacagcacctatctccccttagaaaggggagccgcctgtcctgctgcgtccccaagagcagccctggggaaggtgggggagctctgacttcacccagccggaccccaccatcgggtgctcctcaccgcttctcttccgccccagggagggcttcgccagcttcggaggcttctctaggggcgcatggctctgcaaccggctcagttgctgggctgtgcgagtcccaggggtcgccagggggcacatcaccgtcaggggggaaagtggcgcggagcccatcatgggtgaatcggccgccgcaaccgcatcccttttccaaaggcggcggcgggggcgaggtggtcgggtcacttttcccggaggcctaaagggcagcgcgcgttttctctcctttgggccgcccttccccgccccgccagctcccccgttccccgcggcgcccggcccctggctgcgcagacccctcttcagcctgaagctgtccgacacagaggacgtctttcctcgccgcgcggggccgctcgaggtcccggccgacagccgcgtgttcgtgcaggtggggaccccggggacaccaggggcggatgggggccggtggggacgggcgatccctgatggcgcctccgtcccccaggcggccttggcccgtccctccccgcgctggggcctggccctgcaccgctgctcagtgacgccgtcctcacgcccggccccggggcccgccctggctctgctgcgtgagggctgccccgccgacacctctgtcgccttcccgccaccgccgccgccgagcccgggtgccgcccgccccgcgcgtttcagcttccgcctgcgcccggtcttcaacgcctcggtgcagttcctgcactgccagctgagccgctgccgccgcctccggggagtccgccgggcgcctgcgcctctgacgccgccgccgccgccgccgccatcgcgggtgcgcgggcgcagagcctggaatccgggcgctggggcccttcgggggctgggcacgggcgactctggcagtggaaagaggatactctcggggtctgaggatctgggggttgggggaggtggggcgcaagggtccatctctgccgacagagtttctccggggacagtgtggacactgggttcccccatggacagctctggaatccttcagggctgggggttggatgcagaaggccactaaggggacacatttctgggaacctggtgctgggcctcacatgctaggtgctgggagacgcggaccatgcgatcttgtggggctgggatttggggtccttaggggctgggcggctagccacttgtatgcgtaggggctgggctcagggcaccctaaggggccggatttccaggggtcccatcttggctgtggtggagagctggactcaggtctctcttgggggccctggggaccagagccacgatcccggtgccctgatgtccccgtctcttccccaccttcctctcccccagtgtctgcctcaggacgaggcgtgcgccgacactggcagtggcagcgccgagggcctggctgctgacggcccccacctgcacacgctgacgcagcctatcgtggtcaccgtgccgcggccgccccccagtgagcacgcagtcctcctccgcatggggccgtggggcggcagagcgggtgggaaggacgcctgggagctggacccagtctcagcgtggcacttcccacagggccgcccaagagtgtccccggccgtgcagtgcgccctgagcctcccgcgccggcccccgcggccctggaacccgcgccggtggtggcgctggtgttggcagccttcgtgctgggcgccgcgctggccgccgggctgggtctcgtctgtgcgcactcaggtaccgacgacctccgccaagccgggcccccagtctaatcccgcgcgtcgggacccggggcggccgcgatcccgcctgcggggcctgatcaaccctagctaggcctgcctccgcgatgcccgcagcagcccccaggggccgcccttagcctggcgtggcgcgcagcagcccttctgcagctcgcctctcccttccagcgccccacgcccctggcccgcccgcgagagcctcgcccagcggtccccagcccaggaggtcccagtgaggaaggtaggtatggaggtggagggagctgggtgaggtaggagatctgacagtgacgcttcctagcgcttagttcgtgccaggcactgtggtttttttgtttgtttgtttgtttgtttgtttgttttttgagacggagtttcgctcttgttgcccaggcgggagtgcaatggcgcgatctcggctcaccgcaacctctgcctcccgggttcaagcgattctcctacctcagcctcctgagtagctgggattacaggcatgcgccaccacacccggctaattttgtatttttagtagagacggggtttctccatgttggtcaggctggtctcgcacacccgacctcaggtgatcctaccgcttcggtctcccaaagtgctgagattacaggcgtgagccactgcgcccagcctccaggcactgttgtaaatgttttacgcctatgaactaacttaatccccttaacctctaggcggacactattataatccccattttagagacgagaatgatgaggcattctctgaattaagtaacttgtcaaaagtcacaatactgggtggagcttggattcgaactcaggcagtgggtcacccgcggcaggcgcgggctttgggtcgagccaggggcattaggtgaggagaggcactaggcgaggagaactcagcattcggacccggctcccactctcaccccggcatgcagaccgatggaagaggctagtggtctgctgggaagggaggtggcccgcgtagcgtcccctccctcgctgagcctcagccacccctcccagggatggtgcgcccccaacatggtccggagatacacccagctaccaattcgggaccaggaccaacaggaccggacccgcctccctggacctcggacctgatgaggccacgacccctgcgcttctctcctccccctgtccctcccacctgtgctcaaaataaacctctggactgaccggctaagttctggtgcagtcagtgagcgcgcaacgtgcggggtgggggataggtggggaggcttggggagaaagctgggagcaggacttggggggtattcctgagaaatcgtgacttacaggggtggagcctggggacggggcccatatgcccatatacccgtgtgcactcccaggccatgggagactgtagggcgttttgtctcaaacagaaagcgacacccggccgggcgcggtggctcccgcctgtaatcccagcacattgggaggccgaggtgggtggatcacttgaggtcaggagttccagaccagcgtggccgacatggtgaaaccccgtccctactaaaaaaagtaacaaaaaaagaattagcagggcgtagtggcgcgtgcttataatcccagctgctggggaggctgaggcaggagaatcgcttgaacccaggaggcagaggttgcagtgagccgagatcgcgccattgcactgcagcctgggcaacaagagcaaaaatctgtctaaaaaaaaaaaaaaagcggcacccaaccccacaagcgtaagtttaaaataaaccttccccctccctcctctccttacccggacacctgcccatctgcctcctgcgatctttctcaagccaggccttctccgctctccattacccccgcccggaccctgccctagctccgcttcgaccttctgcctctgctccagttccctcctggtctggacttcgccctcctcttagattgtcagtctagtctagagctccttaaatccctcctgcccgagctccactctaccttacacagacaagagtgggactatcagccccagtctacagaggaggaaactgaggctcggcaaggctaaatcacttgcccaaagtccccaggcctgtctgaccccagagcccaggctcttgaccgactggatcttcggacttgacctttcggccagaacccacccctctgcgagaagcaaagcacacagtagtagcttcatgagttagtccagcaacagagggagggcatgggatccaaggtgtcgtctccacttcatgaatgagataaagtgcaggctgagggtctccttcgccccgccccagttccggtgccgatctccccttcacttccattggggcggttccccgggcctccaaacgcgaagccacgcccccacgcgcgtccgcctccgcgcggttctttctgacctcggcggcccccgtagctccgcccatcggagaagcgaccttacagcgcctgcctctttctgagcggcatgaagccacctcccaggcggcgagcggccccggcgcgctatctgggcgaggtgaccggtcccgcgacctggagcgctcgcgagaagcggcagctagtgcgactcctgcaggcgcggcagggccagccggagccggacgccaccgagctggcccgggagctgcggggccggagcgaggctgaggtgagatgcggttctcgggaccggagccaggctggaggcggggctggggtggggcggagagtgggcggggctgcggcaggagccagcggggcggggccaggaatgtaagcgagcgggggcgtggcgtggggctgagtggcggggcgttagtgggtgagcctgggcggggtgaggggcggggcgtggacgggaagagaagacctaggggcggggcgagcttgggagctagacgtgggcggggcataagtgaagcggaggggcggggcgatgccgggggcggggcgtgcgtgccgctgaggtttggagagtgggtgggtgagtttgaggggcaggacgagcctgggggcggggcgtgggcgggttaatagcaagacttaagggcggggccgttttgggagtaaggcgtgggaggggcgtgggcgggatgagggcaagctttaaaggcggggcgagcctcggggtaatgcgtgggtgaggcgagggctaaacgggcggaatgaactgggagtaagatgctgccgagtccgggcgaaaagcaacgcatgctgttggacaggatacgagcttgaagtgagagggaatagagaagaggggacgaagaagggagttgaacggggtagtagtcagcatagggttgggccctggctgcgtgaaggagccggaactggcctgggccttacaacttccttaggtagctggtcacgctctgggtggggtaggggccttggcagtcactgggactcctaacaccgggccagcaggagactaaggcgcagtagcggggcccagagcatacaagggattgggctttggcttctctgctgcagccctgagctcatagaagcctcattccgccgcctctttcctttctagatccgggtcttcctccagcagctcaagggccgcgtagcccgggaggccattcagaaagtgcatccgggtggccttcagggaccaaggcgccgggaggcacagcccccagcccccatagaggtgaggcagatgaacagggtgaggctgtccagggcaggtccctggtgggtaggtgggagttgcgggggataacctgattaggggatccccaggaggagcagggcttggggggccattgcaggctgatccctgggctgaccctgtacctctggcttcactcaggtctggacggatctggctgagaagataacagggccactggaagaagccctggcagtggctttctcgcaggtaccgccattcccccaggcaggtcagggtgtcccagaggacagggtcacatgggccaaatcatgtgaacctgggtcctgggcccttttgccagctctgtggactccgtcagtcactggacacctcgagcctcagtgtccctggctctgaggccatctcttgtctgaggagcatcttagggtggcagggaggatgggggaatgtgtagacggtgagaagacttcccagctcctcttcctccctgattgttctgcctgccaggtgctcaccatcgcggccacggaaccggtcaccctcctgcactccaagccccccaagcccacgcaggcccgtggaaagcctttgctcctgagcgcccctggaggacaggaagaccccgcccctgaaatacctagctctgcccctgctgcacctagctccgcacccaggactcctgaccctgcccctgagaaaccttctgagtcgtcggctggtccctccactgaagaagactttgctgtggactttgagaagatctacaagtacttgtcctctgtctcccgaagtggccgcagccccgagctctcagcagctggtgagaagggtgagggagggggcaggagcagagggatcaagggtccctggcagcaggcaggggtgtccccttacccctctcctccatccatcactagagtccgctgtggtcctcgacctgctcatgtcacttccagaggagctgccactcctgccctgcacagccctggttgagcatatgacggagacgtacctacgcctgacagccccccagcccattcccgctggagggagcctggggcctgcagcagaaggggatggggctggctccaaggcaccagaggagacccccccagccaccgagaaggccgagcacagcgaactgaaatcgccttggcaagcagctgggatctgtcccctgaacccgttcctggtgcccctggagcttctgggtcgggcagccacccctgccaggtgaggggcatggcgggcaggaggccacaccaggccccccgccctgcccctcggttctgctcggctggccctggctctttctgaggatcccgtcatgggggaaggtccttgagatgatgctcagctgtggggcgggcctctaagatgccccatactttgggggtctcagaaatggaacccccgttgtacaggggttgggtgggggttgcaggactccactcacaagcctcctgatgtcaaggacaggcggacagggctggcctcccccagtccccaagccccactgtgccttgttgtctgctggggggccatagctggcactgcccaccgtaaaggccctcgcacattttcccccttcctgtacacctcggggccagcatcctcaccttcttcaactgaccagtcgtggttactccctgctgccaggtccttccccttcccgggggtattctgtgaccatgaataaagttatcattctctttctctttcacctgtgacttaaagatggaagtgggggccctgaagtgtcagagcttgggggtcacagggctgggggtgtgtgccagggaggagagctgccacctgactggtgtgatgaggcctggggtgaggagccccttggtgactgtgaagctgacaagtgtggatggggagagccggcagggcaccttggggacaggcgtcagggatgggtttcagagtagggcaaaatcacatcgcacaggtggaggggagaaggcagcagagagtgggggtgacccggtggaaggagttgagccccaggctgggcggttagaggaagatagataggggtgggctgccccgagtggcaggaggctagtgggagtggagtgtcccctggggtggctttgggacctcaaggatccctagaaggcggggagggaggggtactggagtcagggctgaccccaaacccctgggggtgctgggaccccgcttgaggccccctccatcagcttcacctgccctgtgggtgtggaccgagggtcgggtcctagagagggaagcagatgtcctcccacggcaccgcgtcccacgcccagctagtaatccaagtcggtaaattctccgttctcggagcctgtgcattcacccagcctgccttttatagaaacgctcattcctccccccacacactgcacacggctcccctggggtgcacatctcttgggagggccttggagcacagccagcccactccgtccgtggtcaccgccccaccgcaccagacccacaaacgctgccaatggtggtgggcagggggaggaggcttaggctgcaggtacggtcggtcgtcggagcctccctccagggctggcagagggtgcgcctcccagttccccacagggctgagtctctctcaccacccccggcgcctccccagatcaacagaattgtgtgtggaggggaggcagctgggggttacacatcagcccccccccccaaagccggtgaaaggtgcttgtgatcttggtgtctttgcagccctgggaagctttaaaaacatgcaaaagccagacctgggttccacttccagccctaccagactctagccatgtgactgtgggcaagtcagtcactggagctgcctggccctcggtctcctggcctgtagaatagggatgctaacagggcctggctcattctcacgatcccgaagaggagacaggctataaacaggaggtgccaactcagcacgctacttggcatgcagtaagcgctcaataatagcttttattatcatgttcggctcagaggcagggaggagtggaacggcatgggagggctgcgggaggcacggcaggggggtcaggggcaagtggcaggagggcggatggggggcagcggtgggcaccggggcagggcgcgctgacctgtcctggggcccgggttgggggcagaaatgagcctgcccacgctgtcccgccacggcaggcgccacgcatcctcgacacagccgccatggcaggccttcgggctccgtctccgggacaggcggtgcagggcaaattggtatgcagcgtccgccccgtgggcccgggagagcctgccccgcagggaccagagcccaaggacgggctcaacactcagtcaaggtggggttgacgacggccagacaacaggggagggaggagggacaagggggtccccacttccagggacgcacaatagcagagccacttacacgctggggagggggcggtgcgggggtcctcctcccgcccgggattcagagtcgggggtgggggccagccgggcgggtgagatgcgcagagaggaagggacagggcggataaaggcacgaggtggggctccggccaggccaggaagggacatgggaggggtctcgagggggaggggctgggcttctcccaactccctccccctctcccccgggctgggggctccggggcgggatcctgagcgcagtcctggccccgcggcgccccccgccgggccggccctctgagaccccggcgcagggccggctagggggcgccgcgcccctcacaccaacgcgtagtcgaactgcccgcgctcgagcgcctccttgtggtcggtccaggacgaggcgggcatgcggctgtaggggtcgagcaggatgcgcacgcagcgcaccatcaacagcaccagcaccacgagcaggcagagcacgaaggcgaacaccgtgcgctgctccgcgtccaggcccgcgcccaccgggggccccgtcgacggcggcaggggctccggcgacagcgtccacgtcgcgctcatggctcacatcgccgcgcgccctgcggaggaggggacccgccccgggcgccggggatgaggctgcgccctccctcccgcgcctcctccgcttcgccccctcctgccgccgccgccgccgcctcccttaacgtgcccgaccccatcccccgcccgcgcctcggtccccgggctacgcccatgcccggcccgccggatcgccgccaccaccacgcggggacccaactctggccgtgcgcgcaggtgggggcgctgagagccgggaaacggagccgcgcccggcctgggccgcacacaacaggtgcgaaagcgcggccgcggcccgggcgcgcggcgtggggacggtccccgcggcccctgcccccgctccctttgttctcggcggcctgggaccccctcccccaccgcccccgccccggcgcgcccctcaccctggcttcgacccggacggggaccgaccgcccggcggccgcgctctctcagggacccgcgccggctgcgcgttcggcctctccccggcggcggcggcggcggcccgggctccggctcagcccaccccacccgcccctggagcggcggagaccgaggcaggcaagcagcgcgcgagccgggccgccgcggctgttcctatggcgacgggggcggggccgccgcggggggcggggctgcagggggcggaggctgcgcagggagcggcgcgcgagccagcgaccccgcccgggcctgcgggaggacggaaccccagccccgaggacccgcgagcacccacgacctcgccggggagtgggcagctgccactcccacctcccctggcacttcgggccccccagcctgccctgtgcctgcattctcctccgcgatagaccccactcgagactccctgtttgtggggggacctcagtggccctaaaacactcatatgggcactcaagctcccccggccctggggacctcaattctcagagagctcaggcaggtcactgggatgagtaagtccccctagttttgtctgtcactggcctcgtcttccaactcagggtccagccctgggcaaggcgtccacccactgcggctgcagttcctcactcgaccttgaccgcctcccacagcagccgcctgctcccacccccaccatcgcctcggccactcccgcgccagagaagacacttcagactccgtagctgctcttctgcaattcggtgttttattctttccaaatctcaggcttatgcacaagatggaagagcactgttaaaattaaaaaatggacctaaagtggcttggctgacgtggctagcgggccactgagccgcgggtcccgggtcccaccctgctgtggggggagtccctgggccctggggcctcttggcactgtgtgacctgtgtgcaccccaggtgaccaggcgccgggacccctgcagggcagagcaacagggcaggggttggccctgcgggggagtgtctccagctgccgcgcacccgcaacagcccgttgtcccctcccgggccagctggtcttgcagccgtcctggcagagctgggggcagagcccgcagtcttgttcccagaggtctggagttgccgcaggtggtgttgcggtgcctctgtgcctgatgacccaggccggggctacctggctccggcaccacactcagagaatctgctcggtgctggaggccgagatgtccaggagccgccaggccgcgtaggggttgagctcgtcctggtctcggcagagcgcccacacgtacagcatccgcagcaccttgtcctgcagggtggggtgggaagggcactgttgagagggttgaggtgacccaggcagctctgggggggggccaggctctgtggggcaggagccaccggcaacttccccaggggctgggagcagaggccagcacaattgcctagactcaggaaccactcagccttggtaaaaacagacaggtctgctggtctccgacctccctcaaccccaaactctggcccagaggtttctccacatccccacccagtcccagagcttcagggctctgagctggggtctctgccaggtggccacacacagatcttggggacaggcggtgtcatgtgcctgccccatcccactccctcactcaccgggtcaccctccaccacctcgcctttggggttcctgaccaccatcaccagctgtgcctggaaggtgatgatcagcaccggcccctgctccatcatcttgcccatggccagctgcagaggggccgagaggggggatgtgcctcagaggacagcccggctgctcccctggaggtgaaacccctgcgcctaggccctgctaggagaaggctccagcaccaggcccagcaccggtccctccccgtgggccttgcctctcaggccaggaccaggcctccctcgagaccctccccttggacaagcccaagacctcttggatcagcccatggcccccagcccctggcaaggccacctcctgggccttgtctgggccatagttcccacccccgatggtggcccgggcccccactgcgaggtgcttacgtcgacgttgtcaatgtctaggatgcgagaatggaactggagacccagtgccttggcctgctggatggggtgggccagctggctgtaagtctgcaatgagaggccgacacgcctgcgtgatgccacccagggtgggcaccacgccacacagagctgctgcccacacaccctggcgcccaggtgccctgccgccagccagcaatggcagaggccaagaacccaggtccaagtggggaggcaggtgccacccacttactggcccagatcacacgcttcccactcctgggaacaacactctatccagatgacccaatgaaaacaggattaatcagcaaagtgggtgattctcttggaacaaaatcccaaatctactcccagggctaagctggcggccccttggctgatctttaatacttccatattcgccgcactctgaatcttggcctgagatcaaacgcctcttctaggatctgtcctcagcctgaggctgcctctgtcactgaccagcccccagtgtcaccctcaaccccctgcgcctgtgccaggcacaggaagcagcccccgagacacgttttcgctggaggtttctctgggcttggcatgaaaccatgagagaaaagatgttctgatagcatctactttttatggaaatgactgatccgcggaggggagagaaaaaaaaaacagagccaatcctacttgttcggtttcttaaaggtgacattttaaaaacacttctgtggacgtggctggaacttcagctgtgtttccagggcaccagcagctccctggcaaagcgagtcagctgtggcgtaatggtcccaaggtaaaaacaaaacaaaaaaccaaaaaaaaaaaaaaaaaaaaaaaaatccacatcgaaactcataaatgcctgctggattagtcaccatgcaggggagtatttaaaaagaaaatctgacatcttctcctctgctttttccaagttgtttatgagctgggtgcagaatagaattagccaagaacgattctggatcgcttaatacgaagaagccaggggaaagaaacacacaggtcggggagcgaatagggtgagatgaggtggcctgaggagatgagagctgggagccccacagggatggactcgggcagggacagggaggctgccagggatggggcagacagctagaccagaccccaggtacgcggtgctgctggtggcccccgaaccccaagctttgactctgagaagcagctgaggcctcatcaggacacagctccttcctggtgtgggaagactatcgatgttttgtttggatctatgtttcaggatcatgtcgtgaggacagctagaggctcccagggcctggggaggggcacccactgccgcaaccccatccgtgccccataggtggcggccccgggtcaccgatgaaagctcccccaactcttccaggggctgtttggttaccagggttacctctgtgggttccctctggcccggggccagcactgccctggtttctgtgatcacacttcattctcacgacccgtgggaggtgagcacagggactctgctctggcctgggaagtgggatgggtgacaccttcaaaccccacttgactcccagcccccccccagtcatgtgggagacccacactgtccctgacccccggccccagcctgcaccccaggccactgcagccacctgaaatagggcagtcggcccccagacacctcattttacttcatggctgcaaccacctctcctgggactctccttccctaaattattatttctttttttttaagacagtctcgctctgttgcccaggctggagtgcagtggtgcaatctcggctcactgcagcctccgcctcctgggttctagcgattctcctgcctcagcctcccgagtagctgggattacaggcgcccaccaccaggcctggctaatttttgtatttttagtagagacagggtttcaccatgttggccagactggtctcgaactcctgacctcaggtgatccgcccgcctcagcctcccaaggtgctgggatgacaggcgttagccaccgtgcccgacctatttccttagtgacagtgtcttgatctgtcacccaggctggagtgctgtgctgcgatgactcactgcagccttgacctcgtgagctcaagtgatcctcccacctcagcctccctaatagctgggacaacaggtgcctgcctccatgcttggctcttttttttttttttttttttttggagacagaatcttgctctgttgcccaggctgaagtgcagtggcgcgacctcagctcactgtaacctccacctcccggatttaagcaattctactgcctcagcctccccagtagctgggattacagacatgcaccagcatgcctggctaactttttattttagtagagatggggtttcaccatgttgcccaggctggtctcgaactcttgagctcaggcaatcgcctgccttggcatcccaaagtgctgggattacaggcatgagccaccgcaccctgccacttggctcattttaaatgtttttgtagagacgggatcttgctatgtttcccaggctagtcttgaatgcttgggctcaagcaatctcccgccttgggctgctgggattgaaagcataggccaccgtgcccagacctaaccaaaattattttaagattggagggaaaaaaaaggcccagtaaaattggcagctttgtgatctctcacaggcccaggggacacccccaaccagccatctcttagacaccagcccagagaaggattctccctaacaaagtttacagtctgggagcaaaggactggcgggtgacccggtgtccagcctgagagcccagatgtgtcacatgctgaggaatggaaaggggcagggggggatgtcaggctctcggagggtgagacgtgaggattcccccaccgggagcccaggtcctgcctgttgggagctaccccaacggagccaccgaagtggaacttctccatggtgattttttaggccttaaaaaaaaaaaaagaaaaagaaaggaagtactcacagcttcatagcaccagtctttgagaatgtcaagctctccagaaatcatggcctaaaaaggaagggaaaataagcaccagaacgagagtgggcttttcaggcagcaggcgaggtcctgggaacattctccagtggtgcggggtggggagtttcctcagacacccccggctgccacctgtggggcgcgggtggagctgtggcactgggtgtcccccccaggcccgtccctgctggtgtcagtgcctggctctggcctaggcacaggcggagggcggcctgcgggcgaccacccaggaggcaccccacagggggacccccctggaacctggtggaggaagagaaaggtggctggggacccagctttcagcctggtcaggaatccaagccagggagatgaggacccaactccggctcccgcagtgagcccatgtcctctgtccccccaggggaccacatttcggactgcaaggcccaccatgggaccggctgcctcctaactgctgggggcagcgagagggaggggtgggctgcagggggcgtgcctgggctgggagctgcttccacaggatcctggagcctgggccggatccgatgagggggagggaggtgcctggagcggggagaagagcgggaaggagccggatgctggtggtgaaagctgtgagcggcagggggcgggtggccagaacacttggcacccatcacccatcccggaaggcactgcggtgctcaggctgctgttttggggcatggcgcccatccgcaccacctcccagccctgcccgaagtggcgggaaggatacgggaaactggaggaggaagaggacgttgggcggaggccggcggggccaaggatggagagtcccatgaagggccttccagaggcctggcccgactgggccgaaggtgtccaggctcctcctgcatcctgggggctgcagagaggcagaggcagcagggaagacaagaggccaccaacctcagggagaggcttatagggggcaggctgcagcatgaccttgagcaagataccctcatctataagcccaacaagggtctggttgccagggacagcaccgtgagggaacctcacggctgcagctctgggtcagacgtggcctggggccagctctgatgtctgaagacagacgcccacttctcccaaggggtgaggggctccaggcacctgagacaatccctagcctccagcagctgctcccagcaacctcaaaggaacaacagcctcaggcaggaggagtgagggaaacagacctggaggtaccggaggtgccggtaaggcccaggaagggcttcgggcacagctcatggggcagctgcagccgggcaggagcccgtgtgcaaccagcctcctcagaaaacagcctcggcagcagagttccctggcagcacccagggtgccggctgcggcgggggaggtggtggagccaggacctgccgcctgggaggggtcctgggggtgtggcacccacctccaggacattggggatgatgtcgttctcgcactgtttcagaaaccggtccttgtcaaaggccgggtccacccggaggatctccgtgagcacctccgacatctctgtcttggagaacaggccccctgcagggagcagagccgggagttcggggggaaggccggggaccccgccccaccaccagcctgcgaggtccagggatgactcactcacccagcaagtcggtgaccttgtccgtaagggcccgggatgcccggatgaacgcgttgtcgctttcgtcatacttcatcttcatctcgaagaaccctgtggaagatggggtaggtgctggagaaggggccccttccagaaacacaaccctccctcacagcttctagaggctccctgtgacccctgcgggatccaccctgacacgggtggggtcagggaggggacggctgtggacctgcatcctcatctgtgcttggggaccgctgcctgcccacctacctggccaggcgcagaggcccctcagctgcggccctaatggggctgtgtaagttatgggccgccaccccactggctgttgctttcactacaaaggaaacacaggcctctagcagtcctcacaggacaagggacaggggcctgcggctcgtttcggggccctgactgtgcttatgagggagcacctggcttctggcggcagaatctacagccccaccatcatgtgaccgcaaagaagtgaccggcccactctgaccccgatctcctcctctgcaaaacggggctgtcttgtgcccaatgcagggggatcaccttgcggtccaccaactgcccgggacacagtcacctgccctccaagacaccttcactcacggttaaacaccacgttgttctccttgaagtccttccactgctggtaccacttggagtccttgtgcagcacgacccccagggcctccctggggaagagggtgggccctggggtgagcggcggcgccagggccaccctgtgccctcctgcggctgcaggcagggggcagtacaggacagcaggcagctgagacctcaaacctaggggctctgaggaccccgccctcacctctcaccctcaaattcgagggagccgggaaccttgggcagaaggcaaactcaagaaacggactcaggagggaaccattggtgggctcccgaaatggacagcagtgaaagctgcccaaaatgggggcagcgagggccacgggctggtacctactcgtttggctcaaacactttctcctccttgaacttatctcccgcaaactccgttctcttccggagtcgctggggcctccggtagggcccggtctgtcccaggacgctgtcgtcaatttccttcttcacggactccaccccctgcgagggaggcacagcggggctggggtgggtgtctgggttcggccgccccaggctgcatgccctagcccaggactgggctcacctgggagagggctctgaaggccgctgtcctgcccagcttctccccgcctttggataccgactcggccgactgcttggccgtcttggctgcttcctccacgccctccttgattttccggccgagatcacttttactgacttcgtgaaggctctactgagacagacacagagagggggcgttggcaccggccctggcggccggggggcggggcaggaggaatgaattcctgccggagagaagggcggatctggttccccgaggccggcagaggccttctgtgctcctgtggtacgcggcacccccagagccatgagcacaacggcacccccagagccacgagcacaccgccacccccagagccacgagcacaccggcacccccagagccatgagcacaccggcacccccagagccatgagcacaccgccacggcttccgggatgctggccctgggctctgggtgagacgctgggtctgctggcccctttccaaaatgggcaggagtcctctggagacccgggaactgcctggcagcaaggattcccaaggaggggaccccggggaaagaacggcggtgagggcgccccatgctgcgcaaagctggacagaacagacaaccgaggagagccgcagcaccccaggaatcctgcctcccgcctctaccctcgggagggggtggaagcggcccctctcctcctatttttaggcaggaaaaacattttcatgttctcctcgagtcctggctagcagcacttactgctgccgactccctgggtcaacggtcatgcaaggttgccagtctgacctcaccctgcatgtgccgggaactcctgaaaccttcccgagggtggcagcacgccccatgccacccactgctgccaagccacccccacccaggagccgactcttcctccagcctccagcggccaggggactttgatggccccagcggctccaggcgggcgtggaactgttacctccttcacggtgcccgtcagctccccaagcttcttccgtagcacctcgctcgtccgcacggtttctgactcgatggttttctaggtaaagagcgctgtgtccttttttttttttttttttttgagacaatgtctccgttgccgaggctggagtacagtggcacgctctcggctcactgcaacttcctcctgccagattcaagcgattttcctgccccagcctcccgagtagctgggactacagggcccaccaccatgcctggctaatttttgtattttcagtagagacagggttttaccacgttggccaggctggtctcaaacttctgacctcaagtgatccacccgcctcggcctcccaaagtgctgggattataggtgtgagccactgtgcctggccaaccgttgtgtctttaagtctgtatgttctgacacggcagtgacatttctcttacagccaaaggtccaagaagcatcttctccgcagcccctccctccccgcacctgccagcatgtgctgcctccagggcccccggctgcccacatggcttggattgagggtctcagcagcggtgagctccttgctcagaaggccggcagactcgggtccccgcttggcagctacctcctgagaacaggaggcccagccttcacctttcaccgggtggtaggaggtggccttgcctgtcatcactgtgcccctcatccagcctccagccaccacagcttggtcttatgtctcccgctccatccatcccactccaaactcagcctgctatgtcttcagatgacccctgcattaatgataaagaggggctgggcatgtgagctgtagtcccagctctttgggaagctgagatgggaggatcgcttgagcccagagagttcgagaccagcacaggcaacatggcgagaccctgtctctagaaatataaaaaaattagccaggcgtggtatcccatgcctttagtcacagctactcaggaggctgaggtgggagaatcacctgaacatgggaaggtcaaaactgcagtgagctgtgatcacaccactgcactccagccagggtgacagagcaagaccctgtctcaaaaaaccaaactaggctgggcacggtggctcatgcctgtaatcccagcactctgggaggccaaggcggatggatcacctgaggtcaggagttcaacaccagcctggccaaagtgatgaaaccccgtctccactaaaaatacaaaaattagcctggcgtggtggtgggcgcctataattccagctatttggaaggctgaggcaggagaatcgcttgaacccagggaggcggaggttgcagtgagccgagatcgcaccattgcactccagcctggctgacagagcaagactccatctcaaaggagaaaaacaaaaaacgaacaaacaaaaaaacacaaatgaaaccaaaccaaaccaaaatgcaagggacccgtggcaggtgcctgcatctctgaggctcagctgctcattggtaaaatggggacactgtaactgcctcgcagggcccttacaaataaaggaatgcagagccattcccagaagccagggcttggcagctgctcaagaagagaagtgacaattaataatgacaggctgggagcagtggctcacacctgtaatcccagcactttgggaagctgagacgggcagatcacttgaggccaggagtttgagaccagcctggccaacatggtgaaaccccgtctctataaaaagatatatagggctgggcgcactggctcacacctgtaatctcagcactttggaaggccaaggcaggtggatcatttgaggtcaggagttcaaggccagcctggccaacatggtgaaaccctgtctttactaaaaatacaaaaattagctgggcagtagtggtgtgtgtctgtaatcccagctactcgggaggctgaggcaggagaatcgcttgagcctaggaggcagaggttgtgttgagccaaaatcgtaccactgcactccagcctgggcaatggagtaagactctgcttcaaaaaacaacaacaacaacaacaacaaatcagctgggtgtggtggcgggcgcctgtaatcccagctatccgggaggctgaggcaggagaatcaggagctggaggttgcagtgagccaaggtcacgccactgcactccagcctggatgacagagcaagactccatctcataaaataaaataaaataaaataaaataccagcaccatcacccagtttccaccaggctccactcagagggctacagctgggagctctcaggagcgctgcatcccatagctggtgtgcatgcgttgcctgggggcctgtgaagatgcgggcgctggcctggcagtttgggagggtgtgagcctctgcactgctcatccactcccaggaggagccactgctgctggtctggggaccacgcttcaagctgcacagaacgctgcatggtctcatggcagaacccagaggcctggagacccgcacctgtcccctggctccctctcattagtgcatcagagcagtgacctcacttcctcacgagccaccctgcccccaaccgtccagccctgagctcctctggctgtccctggcctggagaaaccctggccctggaaacaaacatgtcaaccaagaaaggtaagaagcaaaggggcccaacgcggtggctcacgcctgtaatcccagcactttggaaggctgaggcgggcggatcacttgaggtcaggagttcgagaccagcctggccaacatggtgaaacctcttcactactaaaaatacaaaaattagctgggcgtggtggtgcgcgcctgtaagcccagctactcaggaggctgaggcaggggaatcacttgaacctgggaggtggaggttgcagtgagccgagatcgcaccactactctccagcctgggtgagggaaaaaaaagcagcaaagaaactcacgtatttccttctggcctcctggagcacgtctgattcttctagccttctggcctcgtcacggaatttttttatactttctttcatttctttgtttttggctaattcttgtttgacattatctagcaagccggacagaaagccttttctgtttccagaagaatatgatttggactagaaagaatgtacaagaaaaaaaatttaaagaacatagtagaacatagaatgaaatgccccacagagggactcagggatttttttaaatgttctcttttcggttgatatacatttaatgatgattagctatctcttttataataatcataaaaaacaaagaaacagcaggtgataaaagtgtggtatatccagacaacagaatattattcagtgctgaaaaaaaaatgagctctcagccactttaggaggctgaggagggaggattgcttgaggtcatgagttttaagaccaacctgggcaacacagcaccctatttaaaaaacaggctgggcgcggtggttcacgcctgtaatcccagtactttgggaggctgaggcgggcagatcacctgaggtcaggagttcgagaccagcctggccaaaatggtgaaacctcatctctactaaaaatgcaaaagttagctgcgcatggtggtgtgtgcctttagtcccagctcctcagaaggctgaggcacaagaattgcttgaacccaggaggaagaggctgcagtgagccaagattatgccacagcactccagtctgggtgacagagcgagactccatctcaaataaaataaaataaaataatttaaaaaacaagcaagaaatatgctctcaagctgtgaaaagacacagaggaaccttaaatgtatattgcactaagtgaaagaagccaatctgaaaaggctacatactgtctgattccaactatagaccgttctggaaaaggcaaaactaaggggacagtaaaagatcagtggttgccaggggtttggtaggaagagggtgagatgagtaggggggaacacagaaaaatgttagggcagtgaaactactcttatgatactgtaatcacagagaatgtacaccaccaagagggaaccggaaggtaaaccatgcatttattaataataatgtatcaacatcctgtcaattgtgacagatgctccacactaatgcaggacgtgaagaatagaaaactgtgtgccagatgggagaggaggggcatggcaactctttggacattctgttggatttttctgtaaacctaaaactgctcaaaagataaagccttgtgaaagcaaaacaaggccgggcgcagtggctcctgcctgtaatctcagcactttgggaggccaaggtgggtggatcacttgaggtcaggagttccagaccagcctgaccaacatagtgaaacccccgtctctactaaaaatacaaaaattagctgggcgtggtggtgggtgcctgtaatgccagctactcaggaggctgaggcaggagaatcacttgaacccaggagccggaggttgcagtgagccaagattgtgccactgcactccagcctgggtgatggaatgagactccatctcaaaaaaaaaaaaaaaaaagcaggctggacacagtggctcatatctgtaatcctagcactttgggagaccgaggtgggcggatcacttgaggccaggagtccgagacaagcctggccaacatggtgaaaccttgtctctactaaaaatacaaaaattagccaggtgtggcggcgcctgcctgtagtcccagctactgaggcagaggcaggagaactgcttgaactcgggaggtggaggttgcagtgagcggtatctcgcccctgcactccagcctgggcgacagagtgagactctgtttcaaaaaaacaacagagaaacagtttaatgaatgatcatacaataatccaatcaggcggaaggggccgcctgtggtcaacttttccacagctgtgttgggtataccagctccaggtgggatccccctccctggctcctgtcaagctacaagagaaagctgcatccagcctggtgctcaggccccgtggagtcacacacctgtggtcccagctactcagaaggctgaggtgggaggatcgcttaagcccaggagttcaaggctgcagtgagccgtgatagtgccactgcaccccagcctgggccacagagtgagaccctatcttaaaaaaaaaaaaaagcccagtgctgctccccaggacaggtggccaggcctcctgtcagcaggctgcagtcccattcagatgccaccctggccagcctttctccaggggaaacccaggttctaagtaaaatcatccaggaccacacaaccttatcgcagccctaccagagactcttgggctacaaaccatgggagtgagtgtgtggcgggggactagacaagaaagggaaagagtcacaggtcctgtcccacacccacgatggccccaggacaggactggagaggtaggtagctgcctccaaggaggcagctgagctgaggctctgggcgcagagagagagggagacagaatgtacgcgctgcccgaatgtacaggtctggggaagggagtcaggttttgggcttctgtcctcacgatgctgagacaccaacagaagcacagttgaagaggaatgaccaggagaaactgaggtctggttgtgacaaggtgactctgtaccaatgatcaaagggctatcttctagaaaaggaaacagctatgcttggtgaggtacccacgggcagaggtcacagggaagtagaattcagttcaatacaggggtctcttccaagcattagagccaacataaagggctattctgacagcaccttatccccttacgacatcaagcaagaggcaggtcaagtgtttctgggaccgagaaggccaggcacactgggatctgtcattctgaaagccccggacacagaaggcccaccaccgagatggtacgagccacctctacagccccacccctccctcctgccaatgggatctgaattttcgggcctcccctgtgtctgctggcccgagcatcctgagtcactcaccagtggcagctctccgcccggccggcgcatctgataggtcgacccatggggtaggttgtggctggaaagaaattggattccactgccgaggcatctctaattggggggagagaagagaaagatccattctaacaagaggttgactgagaagtaagcagaccacacacaaaacagcagggtcacctgcaactcactggccattttttttttttttttgagacggagtctcaggctagagtgcagtgctgcgatctcagctccctgcaacctatgcctcctgggttcaagcgattctcctgcctcagtctcccgagtagctggaattacaggtatgcgccatcacatccggctaatatttgtatttttaggagagaagcggttttgccatgttggccaggctggtctcgaactcctgacctcaggtgatccacccctcccccggttttccaaagtgctgggattacaggcatgagccactgcacctggcctcactggccaatttgtatcttatgcctgatgcatgccgggcactctgtaatcttcccaaagtctgagaagcaagcagaagctggtggaaagagaaaatgctgtgtctgtacctccagggcctacatctatcctcgtgcccctgaaactgggggaaaacggacaggtcccaggaaatgccaacccatggggggaagaaggctaaatgtacaatttaatcccttagtctgaaagtaggcactctaagcttctatgctagtggcaagcagtcttctcttgcgagcccaccccatttctgccagcctccaaagatgagagaactggatttttcagacacaaacatcgataatgtgttgccccagggacaactctggaataaacctacaatgtcctcctcaagggttgagctataaacagagtaatttaggggagtcgctctgggcaaagactgggctgatctcatgtaaaaggcacttgctggctgggcgcggtggctcacgccagtaatcccaacacgttgggaggctgaggtgggaggatcacccggtcaggagttcgagatcagcctggccaacatggtgaaatcccgtctctaccaaaaatacaaaaattagccgggcgtggtggcacacacctgtagtcccacacacctgtagtattgcttaaacccgggaggtggagggtgcagtgagccgagatcttgccttaagttctgtgcaggcactgagctggtggctcatgcctgtaatcccgatactttgggaggctgaggcggaaggatcgtttgagctcaggagtttgagaccagcctgggcaacatagctagaccctgcctccataaaaaattgggggaaaaaaaaaaagctctgtgcaggtcctgttcagctcggcaccctgtcacccagcacagaacctggcgtgttgatgtcaaaagaccaggtacaacttctccaccatttccacatttcctgggccgtttttctctctgttctctgcctcctacctctgagaaccctatgcaacatcccaaacttacacaggtgcctactatctcctgtatttacttgaggataacttttttttttttttttgagacggagtctccctctgttgcccaggctggagtaaagtggcaggatctcggctcactgcaatctccgcctgccgggttcaagtgattctcctgcctcagcctcccaagtagttgggattacaggagcgcgccaccatgcccggctaatttttttgtatttttagtacagatggggttttagtagagatgggatttcaccatgtgggccagtggatctcgaactcctgacctcaggtgatccacctgaggctgaggcaggagaatcgcttgaacccggaggcagaaggaggcagaagttgcagtgagccgagatcgcgccattgcactccagactgggcgacaagagcgaaactctgtctcaaaaaaaaaaaaaaaagagaaaaaagaaaaaacgaagagcacgagcaatatgaagtactactttctgagtgcgccttacacgtcttgactgccactgccctgtggacccaagagcctgctagggcgcgaaccacctctcgcacatccacaatgaacgttagaagaaacgagacaagaaatgctctcggtagagaacttggcatttaaccgcgagctgtgaatttcacgtttttttgccttcccctctacttttttccacgggacgccgccgccccggctaccattctctctcctgtatacgtggagtctgatcagagggcgaagggtgatcagctccctcccaggtcccgcgcatcgccgccccctgcccggtaagctcggtccccgccctcaggccacgctctgtgccccctgtcctggcctctgctacccaaagatctaaccccaagctttctaaggagcccaagcaagggtcgcgaaggccaagggtctgagaagaaagccttggtggccgaaggcccagaagacccctaagctcgccctgccagcgccgcaccgccgctcacccgtggacagcggcaccagccactccgcagggccgccgccgccatgttggagaatcgtgtgaccttctcgcggcgcggcccggttgcgtcatccgccgcttcggcctagagccgcgcaagcctgagaaaagccgctccaggagcggggtttcgggtagggagagccctccgattgggtccgtcatagggcggggcattaaaagggtagggaatgcctagagagcttgacctctgatagggcagtgttttggaaggacggggcccgtgactggatgtggcccgggggagggcactcctgggagggtcagatctgtgattgggcgcgactacgagggggcggagcccaggggcgtgtattccgtcacttgcggtgattcggctacagaacgcgccgggcgctggtggcaggtggtacaggcacgtggatccaccgaccacaaggacggattcgattggattctgattgaccggcggaccagctccagagtaattgtctatggctgcccctgcaatgactgattgattgacaatggctgagagaccagcaagtgagtcgctccgagaaagcgaaggagcccactcttgtgcggcgctttgggaagacgcctgttggttttgaccccgaataagaagaggaagctgagagcgggctgactgtggtccagtcctacttcgattcagtgtgaactgacactctgatctgaagacgctcaggcctttgtcatttcagcaccccagatgctattttccattcgaagaatgccgccaccaggtggcggtattttaacatggccatgcaatccgggtatgaggaggagggttggtcccctgggagagctaatgtatgttgctgttgctgtttgtcttattggatccttttttttttttatagagccagaggcttgctctgtcacccaggctagagtgcagtgtcgtaatctagctcactgcagcctccaattcccaagctcaagcgatcctcctgcctcagcctctgagtcactgggattacaggcgtgagctaccgcacccggtctttttgcattactaacctgtgatatgggtttatgggacttcattatttcaaagggaggcagcttggccccggagagcatgcattcctggcttctgcgatggatagacttgtgttctccatctcaggagctccccctcaaggtgggggtaagagatgagggcttccactctggctttgttcgagatgtcttgatgccaagaggagcaaactagttaagcggttggtgtacacaggtgtgttgctaagaataaggtctgggctagaaatatggattcttagttgtggttgaaagtacggagtttggccgggcgcggtggctcatgcctataatcccagcactttgggacactgaggcgggaggatctctccagcccaagagtttgagaccagcctgggcaacatagtgaagacctcttctttacaacaaatacaaaacattagcttggcgtggtagcatgtgcttgtagtcccagctactcaggaggctgagatgggaggatcgttgaggcccgggaagttaaggctgtagtgagccgtgatcgtgccactacactacactacactacactacactacctgggcaacagagagagaccttgtgtcaaaaaaaaagaagaagaaagaaagagagagagagaaaggaaagaaagaaaactacagcattggacactcagaggcagtgtgtcatataagcatgtcaaagacccaaagataaagtggagatagaagactcctttaagccaggatccgtggctcagtcctattatcccagcaactcaggagcctgaggcaggagcatcatttgagcccaggagttacagaccagtctgggcaacataacgagaccctatctctacaaaaataaaaaaataagccaagcatggtgtctctcgcctggaattccagctacttaggaggctgaggtgggaggatctcttgagcccattagttagaggctgcagtgagctatgatcacccactgcactccaccctgggtgacagcatgagacctccatctctttttttgttgttttgagacagagtctcactctgtcgcccaggctggagtgcagtggcacgatcttggctcactgcaagctccgcctcccaggttcacaccattctcctgccttagcctcccgagtagctgggactacatgtgcctgccaccacacccagctaattttttgtatttttagtagagacagggtttcaccatgttagccaggatggactcgatttcctgacctcgtgatccgcttgcctcggcctcccaaagtgctgggattacaggcgtgagccaccacacccggcctttttttttttgagatggagttttactcttgttgcgcaggctggagtgcaatggcgcgatcttggctcaccgcagcctctgcttcccaggttcaagtgattctcctgcctcagcctcccaagtagctgggattacaggcatgtgccaccacacccagctaattttgtgttcttagtagagacggggtttctccatattggtcaggctggtctcgaactcctgaacctcaggtgatcctcccacctcagcctcccaaaatgctgggattacaggcatgagccaccatgccccctcgagacctccatctctaaaaaacaattttttgttgttgtcgttgttttgagactgagtctcagtctgtcacccaggctggagtgcagtggcgtgatctcggctcactgcaagctccacctcccaggttcatggcattctcctgcctcagcctcccgagtagctgggactacaggcgcccgccaccatacccggataatttttgtatttttagtagagacggggtttcaccatcttggccgtgctagtctcgagtcctgacctcgtgatccacctgccttggcctcccaaattgctgggattacaggcgtgtgccactgcgctcagcactgtgggaggccgagatgggcaaatcatgaggtcaggggatcaagaccatcctggctaacatggtgaacccccatctctactaaaaatacaaaaaattagccgggcgtggtggcaagtgcctgtagtcccaactacttgggaagctgaggcaggagaatcgcttggacccaagaggtggaggttacagtgagctgagatcacaccactgcactccagcctgggcgacagagcaagactccatcaaaaaaaaaaaaaaaaaggaagacaatctggaggaacttggagaaggcagatggaaacagcagaggcgagtgctgcacagttcaggcaaggcaaggacagaaatgtagccaccgccattgcattttgcaatatggaggtcattggtgagataagcaagaggggttttgggtgagtggtgggcctgggagccagatttcagtgagtggagatggttttacagaggcatgctggggccagcttgcactgactcgcaagagccagccggcacatcttcaagaattcaaagcctcttgttaaacatggccaatatgtaaacaattaattgtataaacttaagatcaaatagattatattagaacaaaagtaataatgcaaaattcatcacttcctaattatgctgctacatgttactactatctgtgctcttgagggtttttgtttttgttttgagacagtctcactctatcgcccagataggagtgcagtggcaccagcacggctcactgtagcctcgaccttccaggctcaagtgatcctcccacctcagcctcccgagtagctgggactacagacatgcaccatcacgcccagctgatttttgtatttttttgtagagacagggtctctctacgttgcacgggctgatctcgaactcctgggctcaagcgatcctcccaccttgacctcccaaagtgctgggatgaccagcacaagccacagagcctggctactttttaaaattttttgtagagacaggctgggtgcagtggctcacacctataatcccagcactttgggaggccgaggtgggtggatcactttaggccaggagtttgagaccagcccagccaatatggtgaaaccccgtctctattaaaaatacaaaaattagccagatgtggtggtgcatgcctgtaatcccagctactcagaagggaggctgaggcagcagaattgcttgaacctgggaggcagaggttgcagtgagccaagattgcaccactgcattctagcctgagtgacacagcgagactctgtctcaaataagtaaataaataatctttttgtagagacagagtcttgctatgttgcctaggctggtctcaaacccctgggctcactcgatcctcccacctcggcctcccaaagtgctggggttacaggcatgagccactgcacctggcttatcttggggttatttacatatatgatgtctgcgtgctggaaatactatattatgtgagtcactgcattgtgtaccagttctgtttgatgatgccatctttgtagcttgaaatcacctacaagcagatcagccacaagtggtgggagtatttacaccacaggaattggcagacattccaagtcaggagctctttggttggtttgtttctctggtgagccagttattaaacatttcaccagcacagcggtggttgagaatactgggacacagaacacagactcttcccaggaatattcactgtgcacagaaggtgaaatgatggcagctggaagaacatatgggaaggagcgagagtgctttgttttccccaactttttattttgcaaaatttcaaagctacaaaaaaaaaattgcaagaatagtatacgaggctgggcacggtggctcacacctgtaatctctgcactttgggaggccgagatgggcggatcatctgtggtcaggagttcgagaccagtctagccaacatggtgaaactgcgtctctacaaacaaaacaaaacaaaacaaaaaaacaaaaacaaaaattagccgggcatggtggcgcacgtctgtaacccagccactcgggaggctgaggcagaagactcacttgagcccaggaggtggaggttgcagtgacccaggatcctgccactgctctccagcctgggtgacagagtgagactccatctcaaaaaaattttaaaaatattggctaggcgcagtggctcacgcctgtaatcccagcactttgggaggccgaggcgggcggatcacgaggtcaggagatcaagaccatcctggctaacacggtgaaaccccatctctactaaaaatacaaaaattagccaggcatggtggcaggcgcctgtggtcccagctactcgggaggctgaggcaggagaatggcgtgaacccgggaggcagagcttgcagtgagccaagatcgcgccactgcactccagcctgggcaacagagcaagactctgtctcagaaaaaaaaaaaaaaaaagatcaaatgtttagccaaccaaaattagtttaaattatacaacccgaccccagccaataaaaaagggtacaaaaacaaaacttgcatcaaaaataaaggctctcgtgcccctttgttcaagtatactcataacaactggccaaaaaaacacccccctgcacaaaaataaattactttgctaaaaattcttcgttcaagtgttcaatttccttaaaattttaagcgttattcctaacagtttgcactcctatgagaatctaatgccgctgctgatcttacaggaggctccagtgatggggagcggctgtaaatacagatgaagctttgctgcctgcctgctcactgcctgcctgctcacctcctgctctgcggcccagttcctaacaggccacagacaggtaccagtctatggcccagatgatgcagacccctgtcttaaacaaaaacaaaaaaccaaagcacacttaatgtgagatctactctcttagcaaaatttttgtttttgttgtcgttgacacggagcctcattctgttgcccaggctggagtgcagtggcgcgatctcggcttactgcaacctccttctcccgggttccagcgattctcctgcctcagcctcccgagtaactgggattataggcaaccaccaccacgcctggctaatttttgtatttttagtagagatggggtttccccatgttggtcaggctggtcttgaactcctgaccttgggtgatccacccacctcggcctcccaaagtgctggggttacaggcgtgagccaccgtgcccggctactgtgatgtgattattatacatcgtatgcctgtatcaacatatgtcctgtagaccataagtatatacacctactacgtacccactaaaattaaaaataggcagggcacggtggctcacacctgtaatcccagtactttgggaggattgcttgaacccaggagttcgagaatagcctgggcaacacagtgaaactccgtctctacaaaaaaaaaacacaaaaaaattagccaggtgtggtagagagtggctgttggtcccagctactcaggaggctgaggtgggaggattgcttgagcccaggagtgagaggctgcagtgattgcaccactgcactccaggtaactaaagtacaatggggccgggtgtggtggcccttgcctgtaatcccagcactttgggaggctaaggtgggtggatcgcttgacgtcaggagttcaaggccagcctggccaacatggttaaaacgtgtctctactaaaaatacaaaaattagccgggtgtggtggcgggtgtccgtagtcccagctactcgggaggctgagtcaggagaatcacttgaacctggaaagcggaggttgcagtaagcttagatcgcaccactgcactccagcctcagcaacagagagagactccgtctcaaaaaacaaaaatagaggccaggcacagtggctcacgcctgtaatcccagcacgttgggaggctgaggcgggtggatcaagaggtcaggagatcaagaccatcgtggctaacacggtgaaaccccgtctttactaaaaacacaaaaaattagctgggcgtagtggcgggcacctgtagtcccagctactcgggaggctgaggcaggagaatggcatgaacccgggaggcggagcttgcagtgagccaagatcgcaccactgcactccagcctgggtaacagagtgagactctgtctcaaataaaaataaataagtaaaataaaagtataaataaataaataaatacattacaatgaggttattagggtatgagccctaatccagaaaaaccggtgtccttataagaagcagagattgggccgggtgcggtggctcacgtctgcaatcccagcactttgggaggctgaggcgggcgtatcactgaggttgggagttcgagaccagcctgagcaacacggagaaaccctgtctctactaaaaatacaaaattagctgggcgtggtggctcacgcctgtaatcccagctactcaggagtctgaggcaggagaattgcttgaactcaggaggcggaggttgcagtgagctgagatcgtgccattgcactccagcctgggtaacaagaggaaaactccatctcaaaaacaaacaaaacaaacaaatgaacaaacgaagcagagatcagccgggtgcggtggctcaaacttgtaatcccagcactttgggaggctgaggtgggcggatcacaaggtcaggagtacaagaccagcctggccaacatagtgaaaccccatctctactaaaagtacaaaaattagccgggcgtggtggcgggcgcctgtagtcccagctattctggaggctgaggcaggagaatcacttgaacctgggatatgtaggttgcagtgagccaagatcacgccactgcactccagctcgggtgacagagtgagactttgtcccctctgcaaaaaaggaagtggagattaggacacagatacacacagagggatgactgtgggaagacacgagaagacggccatctgcaagccaaggagagaggcctcagaagaaagagaccctgctgtcaccttgatctcaaacttccagcctccaggactgtgaggcaatgcatttctactacttaagccacgcggtctgggtgctctgttacctgcaggccgagcaaaccaatgcaggtgcccctcagcctcttccctctggctcccagcccccacccactcgcattggctgttgcgtgcaggcctctgccatctgtctgccttctgtctggcttcctttccacttctgtaccttctacccagcggactcctccatctccggttctccttctcgaggtataattatagctgctggcactagtgcctgtctcctctgtgccaaagtgtgttcctggccatcagaggccgtatcttattaacaccaacccggtaaccctgggaggcaggagctatcattagctctcttataccaaagcgatgcagcacccaaggcttccagagaggaagggggatgcccagggccacgcagctagcatgtaaaagataatctgtcacctgggcatggtggcacatgcctgtggtcccagctactcaggaagctgaagtgggaggagtgattgagcccaggcgttcgaggctacagtgggctgtgattgcaccatcgcactccagcctaggcgacagagggagaccctgtctcaaaaattaaaatagaagcccggcacggtggctcacgcctgtaatcccagcactttgggaggccgaggcaggtggatcacgaggtcaggagttcaagagcagcctggccaagatggtgaaaccccgtctctactaaaaatacaaaaattagctgggcgtggtggtgggtgcctgtagtcccagctcctcaggaggctgaggcagagaattgcttgaacccaggtggcggaggttgcagtgagccgagtttgtgacactgcattccagcctgggcaacagagtgagactgcgtgtcaaaaaaaaaaaaaaaaaaaagaattaaaatacagtaataaaataaaataaatagcagggtgtggtggcatatacctgtagtcccacgtactcaggaggctgaggtaggaggatcgcttgagcccgggaagtcaaggctgcagtgagctatgatgctgtccactctagcctgggtgacacagtgtgagacactgtctctaaaaaaattcaaaacgggctgtggccaaggcatcatttcctcctgcctggattcccgactttccggaggcccttagccctaccggggcagttcgggcatctctcctgagaggtcccaggtccattacaggctatttccacggtctcgacatccccagctctttgacgctggccactggccggccacgggctgtgggttgggggatccgtggctttcgctgaggacccgcaggcctgtctccatgaggcttgacttgatagaaactggcactggggcctgtcctgtcatacctccccttgtcaactgccccttcctaggtgcacccttcccccaatctcttatcctaggttctgtcaactggaaaggagcctgattcagtggccttgcccaggcctgcttcctctcctcccaccatgcgctggctctctcagctgcaatttcctctccttacccatgccccactcactccacgggccctcggccagctgccattccattcctcctacctctcctcctccacctcctcctccctctccttctcctcctcccccttctctctctcctcctcctcttcctccctctcctcctcctctctcctattcttcctccctcacctccttccccctcctcctccccctcctctcctcctcctcctccccctcctccccctcctctcctcctcctccttctcctcctcttcctccctctcctccttccccctcctcctccccctccccctcctctcctccttctccccctccttcctctcatccccctcctccctctcctccttccccctcctcctccttctctcctccccctcccctctccttcctctcctccccctcctccccatcctcctcttcctcttcctccaccatcccccagcattaacatccctcactgtaagaaaaccaaacagacaaaatgccatccttgcaatgaaggtgaaaggccacggtctacaagaagtcctaagatgaactgaaaaattctgagcggagactcgattgcatcaggtatttgggagagaattccccagccaggccttcagcagctaccgggagggaccctggggggaggaggctgccctggaggcggagggagtgcaggggaggttggcaggtgctcaagggcccccggcttgggttaatgctttctgttgccattttgaaattctttttctttttttgagacggaattttgctctgtcacccaggctggagtgcagtggtgcgatcttggctcattgcaacctctgcctctcaggttcaagtgattctcctgcctcagcctctcgagtagctgggattacaggcgcacgccaccagcctcccaagtagctgggattacaggcgcacaccaccacgcccagctaaatctttgtatttttagtagagaccaggtttcaccatgttggccaggctggtcttgaactcctgacctcatgatccacctgccttggcctcccaaagtgctgggattacaggcgtgagccaccacgcccagtaacaattttgaaattcttagtcatcttcgaccaacaggccctgcacatttttcctttccttttttttcttttctagctgattgcagcctcgaactcctgggctcaagtgatcctgttacctcagcctcccaagtagctgggaatacaggtgcatgtcaccactcccggcctttttttttttctttgagagagagtcttgttcttgttgcccaggctggaatgcaatggcgtgaactcgactcactgcaacctctgcctcccgagttcaagcgattctcctgcctcagcctcccaggtagctggggtttcaggcgcccgccaccacgctcggctaatttttgtatttttagtagagacggggtttcactatgttggccaggctggtcttgaactcctgacctcaggtgatctgcccatctcagcctcccaaagtgctgggattacaggcgtgagccactgtgcctggcttttttttttttttttttttaatagcgtcttgctctgtcacccaggctggagtgcagtgacatgatctgggctcactgcaccctccacctcccaggtttaagcgattctcctgcctcagcctcccaagtagctgggactacaggcacacaccaccacgcccagctaatttttgtatttttagtagagacagggtttcaccatgttgggcaggctggtctcgaactcctgacctcgggtgatctgcccacctcagcctcccaaagtgctgggattacaggtgtgaaccattgtgcccggcctcatttttacattttttatagagataggctctcatgatgttgcccaggctggttttgaactcctgagctcaggcgatcctccctcctcataccagttctcaggacaggttgctgagaactcctcaggctctgaggacactgaggtgggagggaaaccgcgctctccctgccccttgccccccagcgaaaacactctcatgtcagaactcggctattactaaacacaaacagtggttctccggacaacgcaggtgtctaggtttctccttctcttccagaaatccttttaaattgtgctaagaaattactgaggttgaaagacacacacaaagcccagggaaaaaaggatgcaggcctcagacccttgaccttgaagggagcaatggaaatagcccccccccagaggcgggggtccagaggggactggtggaactcgaacgtcccccacaacacacagggccctggcttggggctgggcctctcgggctctgaattctggggtgaggcggggatcgggagccgtctcttctccttggaggagctcggggggtggatttccttgcttggttgggggtggccgcaaggcctgtggtgagagcatggggggtgtccaggccccctggtgtctgatcctgagcccctgagccctgtctacccctgcaggtcatgcaggcagtactcagcctcctacccaccctcaactttccatccatgtctaaaccctgaaacagatagttcagaggcacaaaactaagggggcggccgaaagccaggatgctctacgccaaactaagaaaataatcaccagcacagcgtgttttccaatccgccaagttctgctgtgtcatctgtgaaataggtgcatgaacggtaaagtactgtgtaacgcaaaaagctaacattcactattgggtccttcctgttccaacgtcactcccttaagggccctgcccctgctgcccagagcgtccaggcattcagcacccctactgtgtggggcaggcgtgcccggtctgttctccctgctgcccagtgggtgggcccttctgggtggagtagaacatgtttaagcccttaacctgggaccagcgctccctcgtccacagggctgctgtgggacgtcaagatggtttcctggccaggtgaggtgggtggctcacacctgtgatcccagcactttgggaggccgaggtgggacaatcacctgagatcaggagttcgggaccagcctggccaatatggtgaaccccatctctactaaaaagacaaacaattagccgggcgtggtggtgtgcgcttgtaatcccagctactcgggaggctgaggcaggagaattgcttgaactggggaggtggaggttgcagtgagttgagatcgcgccactgaagtccagcctgggcgacagggcaagactccatctcaaaaaaaaaaaaaaaaaaaaaaaaaggcttcctgaagttgttgtggcagaggatcagggacagcagagggtgagattcgctgcgctcccccccaccccaataaaaacactctcatgtcacagcttggctctcgtatgactaaacacaaaccgtggttctccagacaacgcaggcatctgtttctccttctcttccagaaatccttttaaattgtgctaagaaattactgaggttgaaacacacacacgcaaaacccaaggacaaaaggatgcatgcctcagacccttgaccttgaagggagcaatgaaactagtccccatagaggcaggggtctggagaggtctggtggaacgcaagtgttgcctgccatgcacaggcgcctcactgggcctcttgggctctgaattctggggtgaggcagggatggaagccatccctggagcagaggtggagatgggggctgtcaggtttcattaaggttcgtcccacacaggggactcttctaaacttcttgcttctcacggtgagtctgacactggcgtcaccagggagaaatacaggttctcaggccaggcgccgtggctcacgcctgtactcccagcactttgggaggctgaggagggcagatcacctgaggtcaggagtttgaggccagcctggccaacatggtgaaaccccgtctctactaaaaatacaaaaattagccaggtggcgtgggcctgtaatcccagttgctcgggtggctgaagcagaattgcttgagcccagaaggtggaggttgtagtgagccgagatcgcggcagtgcactccagcctgggcaacagagcgagactctgtcaagaaagaaaagaaagaaagagagagagagagaaagagagaaagagagaaagagagaaagaaagaaagaaagaaagaaagaaagaaggaaggaaggaaggaaggaaggaaggaaggaaggaaggaagaaaggaaagaaagaaagaaagaaatgcagattcccaggcccacaccagacctgcagaagacgaatctgctttgaaatgatgctcccccatgggaggcagatgcattcttaagtttgggaggcgcagacgcccggaccctttctcctgggttcacaggtggggcggtcaggagatccattagcctgagccagtggagctgcccagaggccgcaggagccccagctgtcggcccctggggtctgaacacctgggggatggccccgagcgctgtcagggctctggctggagcacagccctggccctttggccccaggtggtgtcagacaacatgggtttttcctggaagccgagggatcatttagtcacgtctggaagagaaggtgatgaacacagacccacaagacacacaagcaatagagaaactagcaacttgaaaacgggctccgtaaatgctttccgagagaccgggctgcgggcccatgttagctcagctctctgggtgctgggcgcgaccatccagtccttggctgattcttggtagcaactgtcaccatccctacttgatctcattttcctgaggatctggagggggtgggcagcgtggacccatttcacagagggtagagcggagactcaagagagccagggactttcccctgggtggcacgctggggagtggtgtcagagccaggatttgaacctggactctctgaccttgagacccctaaccattcccatcccaaaggagacaaaggagatcagtctcacggaggggacactgaggatggccccagggctcgggagtgactatggttccacatacagacgagggaagaggcaggatccccgggtcactgttgggggagcactggtgtgggaagcagatggaggggggccatacccaggggccactcggtgggcccactgacctgtgaacctggagaagaggggcatctgggtgggagctgaagggccgtgggtcagccagcacagggcacacccgaactgggtgtcccctcgtgggctcccgggacctggcacaggcttacctcggagggaagaggtccccatcccctggcactctattactgggctgtgggctgctcacaagtcatacaccatcacccctacaccagcacatcgcaatgatcccacttcatttattaccaaaatatcacagaattccagtcatagttaacatacagcgtttaacacgaacctgatacctgtagaaagaactgagtatcgggacaattgagtcgttggaactgtaagccacgccccaaaccgcatcactccgtacttcaaaaatacgattttttgagagctttggaaactgaattaaaatgtctacacagctatgaacaattgtttaataaaactttttcatgtttccattacatgtaaatatatcaatttggcatctctataaaaactctgaaaatggtgcaaaagtttcattctctttgagaaagccattgacaaaaaatattcacacttcactaaaattttgaaaaatggtcttctttcaaagcttctttattaatctgaagtcttctgggttatcaaaatctaggtttgctttttcctcctaaaacactaaagaacatttattcacaaggattaaaaaaaaaaaataaaaaggcaatgggctgatggaaaactgataagggcttttctttttttttttctgaaaataatttaaaaagcttaaaagttacataggcatcttcaaaagaacacaatgggattcattttattgttgacttttggacaccagtgtcagactttattgaaaacaaacccatgtaaaaacaaagttaaaatgaaaaatggcacctgaaaaataaattattttatataaaacaaatcaataacttaaaacacactaatatacaaaaggtctaaccatctactgtacaacatgggaatcggttaagagagcctcccctcccccaaagcaagtcactgtaaacggaacatcacatggtcatggtcaaagaggtggccccaaaccaacggaaaaggcttctcttctggtggaagaaaaatccagtcctgtcaaagtctccgttagcctaacttaggtactggcggtgacttacaagtgagaaaaaaaaaatttgtttttttaaatggccaagaaagaaacctgaacgatgtcactgaaaggttgtagaaaaataggatccagccattagaggtcaggggaaatcaaaaaggtttggaaatgtgaaccctgcctgggatccgagattcagattctactgccatcattacacgccaattgccaatgccacttaaaagaaagcacttgtgacttcagggctgtcttgcgaagtttggggacaggaacccctgacccccagagtcagctaaaccccaggggtctctgctaaggagctgcctcaggtcctagtaggtgaggtaggtctggggaagatgggaggggattgaggtggagggtggggtggagggacaggatagaggcctcctgtcagctgaattcttattctctttcatccaacacaggaaggctgcgaaaagcacatggaaataaaagggggctgaatcggatgtgaaatgtaacagctgagtgatgtcaatttcgatttttcaagtccgatgccggactgggtaagtcatgtcttttcaatgcctggtggacaaatggccttcatttggaagcaaaccgggtcaaggaattgccactaaccgtcttcgggtgcttctatttctctgatccagcagggacccctgggctgccggctccaaagggccggtcttggctcccaacagcagcacggttcagtccctggaggctgggtctccaggactaaggccaagcgcagactctcagaggttaaggcagctgcccttggccaggaaaaggctcaccttccaggagaaggtggcggaacccacccagcaccacctgcgggcgggcccccgaggaagcccatgaatttcaggatattcacgcaggatggtggccggggaggggactcagcacccgggagggaatcagtcacagagctgcgactagaggcacagccagcacagaaaactgcggcttggcaaattacactgaaaacgaaataatggcagagccaagggggaacaagggagaattcatcaggaagcaggttcacaaattcggagctgcctggggtctaactaccagaggaagttacacacgggtcaaaagggaattcaatcaaagcctctttggtatttcccaaaccagatttttgataaatgaacattatctactctgaacgctttttcatcgaaattcccaaataaaagcagagcactcatttttgctaaatagaaatacaactgatctatgtaaaattttttaagaaatggtttcttttgggttgagccttttttaagaaaagggatctcccctttgcaaacaggccttgataagatgtaatgaactttgaggacacagggccagcaactagaaccttgatggaacagagattgcttttcaggagtgacagttgttaagctaaatccttccacaagcttgcaagctaagactcccaaataaaggctttggaattttttagctagaaggctgttcaaacagcggagaccacatacaatgagaatgttcctgaactgagaaacttcagggaactttcaaaggctcatatacttcacagtttcttctcacctgtcccagcatcagaataattgataggattcagataaaagggggcgaggaaagaagctgaggtgctacaagcccgtcatcattttcacagttgaagcttaagacagagttctctgttgaatgctagctatgggcatgtgtgggagtgagactccagggggagtttcagaagcgggaatcccgccttccatcagaagggtgttggctcccaccttccatcagaagggtgttggctcccaccttccatcagaagggtgttggctcccaccttccatcagaagggtgttggctcccaccttccatcagaagggtgttggctcccaccttccatcagaagatgctggcccagggaaacctgaaaggcttctttttccaggaaagcattctggtcccaggatgcagactgctctcgggcaacagagcagggaccctcttttgtgtcgaatccgggcaatgggcctcggttttggcttttcctgaggatctgggattctgtgggagaaaggaggtcctctctggcaccaggccgacttttatgagacacagcctgggtacggatggcaacatcatcaatttgcaaggatcgcgcacacagcccctcagtaaaagatcagggaaaggggaggggatgggcatcctcaattgtccaggggcctctcgagacgctgacctgctctggggacggtggtgcctgcctattgctcaatttcacacttcaataaataaatacataaataggtataaataaacagataaatacagccatcatctcatgagagcaataactaaaaaacagcctacggtcacgttttagtctcacgtcaaggttaaaaactgctggtactaagttatcctgtttgtgattctctctgtaaactagttatttataaacgccagatcccagtcctgaggagttttgggtgatctggccctgcctatttcacaggctttctctttcacccttcctccgggctcctggtttaaaagccaccagcctgtaactgcacattcttgcgtcacagattcagaaatgcttttgcttgaggcaaggattggtttcttaagatcttacgactcctccctgaatgctgggccacctgcaccttccctagccaaaaagaaagaaaaggtaaaataaaaaacaaaacaaaattcgagcaaaacaaaatcaaatttaatggtcttaaatgcaaaagtaaaaacaaacaaaaaacacaaaaaagcaaaagaaaattaacagaacagaacaacccaaaatgtcaaggcagttatgaagagaactttgagggttaatctttaaaactacaaatcaaaggttttggttaatagataactggcaagaagtaagtacttttctgctgagtgttcatacaaaagcaaaattccaaaacaaaatccgactaaaatagaaaaaggtctaagcgctcacgagaagggatgcgagaaatacaatgctcaaatgtttctgtgttattaaaatacagagccattttacgcctccaagctatgttaaatgctctggaaaacgggagaaattatcgtgaacaacagtatccaatgtgtggggcgctgtgcatgcaatgtgtggacagaaactcgggatgtcagagtagcaacacatcttcaggcgtgcctggagcttagatctgactctggaatatactggagtttccctgaaactctttggtccattcccattggtgcctgggcttacgaaacacgtttgtgtccttctctggagggcccgcccagcatgcagcccgtggcccccggccccagtggtggcccacgctggacgggcccgccgccattcccaggaccactcggcagagcccgggactgagtgagcaggaggtggcaacgggacctgcctggaaaaggaacttcctgtcaaccaaagcatacatcgcttacaatgttgaagcggttgagaaaacgcacactcagcatctgtctaacatctttagattaaaaactaaaactaaaaggtgatttttttgctacccagtctgtggagacattgaatgaaacgcgtgttagacagtcttagaggttaaagcatgcttcaggttcaccaccatccagagggactggttagtcaatgcagttctacttagatttctgtttaatatatatcttaaaggaaataacttacgaaacttaagattggtctaacattgtgggatttcaaacatttgaacatgtcggttgcatcccagagtataaaaaccttctcacttctcattcagacaaagacaaacacttgtgaaaattggcgcaaaatgagttgtacactaacaagaaaagtttcaactccttcactcttaattatctattccgtacaaaaaaaagcatgagcgagttatttgtgggacttgttggttttgaaggaaacctgtaagattttgtcccccaggcggtagccgttcaggctggctatggccatcgcggcttcttcatagtttgtcatggtcacaaagccaaaccctttgcacttgttggtgttgaagtcgcggatcactttcacattggtgacggcaccaaacggcccaaacatctgccagaggatcccctcgtcggcatcctgccccaggttgtagatgaaaatgcaccagccggaggaggcgtttcctggcacgttgacgccagagagcccgctcatgtgatcgacgcccatgggggagaacctggcagacagagagcaagcgtcaggccacggtcagcgcaggcggcctggggatggggcaaggcctggacgcatgctgaccatggccgctgggccccatcccgctctgcgcagccacgaggtgctcacggttgagacacctgcatgggtcaaaaccctgggaggaattaaatacagtagtggaggggcgggaccctgttctgtagggagctgactctgaggggctggttggtgccctccactcctcccactgtgtatgtcggggtttctgtttaggggttcctgcggttccccacattttagatgatgggcgcttctcctggtcctccgttgaaggtagaaatgctctgcaggcctctgacagcctcagttctccctggaggaaactctcctcgtactgtggggtacgtgcaggggctgaactcctttttccaaattttgcaccttccccttatcatgacccgcccccaagcgttgacagcccagtggtctctggttagagcacgcctttgccagggccacttgtagggcacaagaattccttcccaagcaccaggcaaccaaccctctgtggctagagctcaacatcccctgagggtcaggggccaaaccactgaggactgagaactcaagggacagggaagggccctgggacaccagcaacggcaggctcaccaaacttgaccacacacgtggggctctttccacagtgatacttttatttacataaaaaataagcctttctgggccaggcatggtggctcaagcacggaatcccaggactttgagaggccaaggtgggaggatcacttgaggccaggagtttgagaccagcctgggcaacacagagagaccccatctctaggaaaaaaacaaaaacctcagaaaacaaaaactaaactaaactaaaataaaataaagccttctgaaaatgtacagatgctgtaataaggattaaggtatatgacaaaacagttcctaaagctatgtttccctctggaactttctcacattaaaaaagtaaaggtctgagggtcagtttgggaatatctgagtagcatacatttgtgaagccggcatctgtgaagctgcgtgatgcatgcagagaagcattacctgctccaaaataaaactgggcttcaggctatggccctatcagccaagcgcagccctgcaggccccagccggggtaaacgagtgccttcaagcgctgttaaacagattcaccctctcgacagacacgagaggacaccagctgccatggggcagctcactagcccaacggtgattttctttatttttgagagagggtctcactatgttgtccagtatggtctcaaactcttaggctcaagtgatcctcctgcctcctgagcagctggaccacaggtgtgtgccaccatgctggctaatttttacattttttgtaaaaccattttcaggatggaaagactaagaagaaagggtctatgttgtccaggctggtctcaaattcctgggctcaagtgatcctcctgctttggcctcccaaagcgttgggattacaggcgtgagtcaatgcgcccggccttcttaggaattactcttgttggtagtttttctcctgctgatttctctggtcttgacagtcataaatcttctcctctcttcctccaacccaattcttttccatcccttatctctgggcttttctggacgtgatagggactgactgcaaactcactgcagtctgggtctttcttcctcctcttctctcagcctcctgagcgaatctttccctccagactctcccgccctccccacttccttccatcactttgtcttagtggttgccctgccactcacttttcctgctcgaccagaaatgtccacttctccggtttcccctttcttttcttgtcctcattactgggaccagagtcccatgtctcctccaaccttccctgttttccttccaggctaaggagcagttcacccaaccccaccgcccatatagcccgccccatcaagagcaggaccgactgtatgatgggatttctagagctggattttaaaattcagctccattccgtccagagaagcttccccagccttgtcttcaagccagaaacctcaaggaaggcaggccagctttggaatttgagccaggctgagaatgctgggtaactcagccatgagaataacacctctcacagcagcatgtgtggcactgggcagcgcccacccagcttcactgttaaaacaacgatggggccgggctcacgcctataatcccagtacgttgggaggctgaggtaggaggatcacttgaggctaggagtttaagaccagcctgggcaacacagtgagaccccatctcaacaaaaaataaaaacattaaaaattaaaaaaaaaagggaaatctatccttgtcatacctgagataagccctcgatgccactccttgaggttttgacaaaaacaaaacagccctgacactgagacctctgctgtttctgaggcgacagcacaccacatcctggagtccaaggccctgactctcatcgcctctatcccacttcatcctggcagccagaaccattttcaggatggaaagactaaggaatccgggaaaactcctcccctctaggacagggcttataaacagaatgcatacatacaacattcaccaatacaaatgactccacgaggcaggtgtttgaaaaaggtttgccttagggctgctgatcaaatgtctaagaatgctggaagatctactctcacccgagtatacctaaggcagcatcttttctcccacagatatgagacgttcattattcatttattttttagagaaagggtctcactctatcacccaggctgcagtgcagtggtgcaatcatagttcactgcagcctccacctcctgggttcaagcgatcctcccaccatggcctcctgagtagctgggactaaaggccagcatcaccatgcccagtttttttcattactttttgtaggaacaggggtctcactttgttgcccaggctgctcaaactcggggcttcaagtaatcctcctaactcggcctcctgagagctgagattacaggtgtgtgctcccccacactgggcatgaaaccatctttaaagctcgcggctccgttctgctgttactaggaactgcgtgctgaagctctaagtgctcacgctcacagcaactggtggggactggtgctgtcttttttttttttttaataaaaacaaaaaaagacaggttctggccctgtggcccaggctggagtgcagtggtatgatcacaactcactgcagcctcaacctcctgggctcaagcaatcctcccacctcagcttcctgagttgctgcaactacaggagcgcaccgccatgcctggccagctttgtattttttgtagagatggggtctcgcaatattgcccaggttggtcttgaactcctgggctcaatcgatcttcctctctcagccacccaaggtgctaggattacagggataagtcactgtgtccagcctggagtcactgttttgattcccatgaaagacaacgcccaatcggaagtaaacggctttcctacagacacctttctgatggaggttgtggtgtggagctgcagaatgattctgaaacgcgctctctgacgggatcagtctatcatccccgtggtttctattctgtggctgtgccgtcgcctgccagcggggctaagtatggctttcaggagcgcgcaccctcccgacccacctgaatctctgcgcctggtggtgaacggggcctccgaaccgtcgcgctggcgagtggtacagctgcgagaggagtgccacgtttttgttctggttggggttggctgcaaacttcactgtgatgggctcagaggaacctgggggtttatgaccattgaaactggtaattgcctcttctgcctccgaccgtttgtcaaaccggataaacgcaacccctctggacaaaccttttcaacaaatcaacaaaaacggagttagggggaaaaacgctaggactttcaaaactgaaaagcaaaagtcaggtcagtctactgtgggccaggctagaagtctggttaaggaaataaacaaaaattaaacctaaaagtgaaaacaaatggatggagtaaagaaaaccaatgactaacagaagattaaagcttcagactttcttcccggctgaagccatgactccacagtgttggcgcccaaagatattttggtgacagacatccccaatagacacccaggcctcttatttggaagaaagcaacattaggaaacagcacatccaccgtcactatttagctgccaggtgtccgccacagagtgggtgcgtgggtgtggtgtgtggttggtgggtaacagggttggagtggggactgcgtctgagagatcctccctgggctcaggggccactctcctggctgctgtctctgggcccgctgtgacagcaggcctcgtggccgagcctgctgcaaaggtgcccagctcagcctgcatgccttctccttcatgccaggagggagtagggtcctgtggccaccccctgccagctccatgctgctgctgtcacctcactcctgtcttgggatactccactctaaggtcctacacccctcccgtgggccccaaattgccatcagaatcaaatgaggccagaacactgcccaggctcatacagcagagctgaacctatccacaggctcgccaggcaggcctggggtccctgtatgggaagggccagggccccagcagccaagcccagagggcatcttctcttgccacctcaactgagccacccaagggccagtcccgggttcccggctaaacccaatccctggacggagcagtgtgagacctgaggaccgtcctgctatgggggacattggtcagctgggcatgggtgtgagatgctgagcaaggcgggtggaaggagagcatggctgtcctgcacccctgcctgtccatacactaggcccgggagggaaacatgagtagcccgtcccttgaggaacctgggaagcgggctggaaactggatgagggggatggggatgagggcacactgagcagcgcactagctccttctctgggggcaaggacatgatggagtcaggggaaggcccaggggtgggagaggtgacagctgagaggccagtctgagagtgacatcactaggcgggagtcacgggtgtgtcccagtgggagaggccgtcacagacagcccaacccaaacaccctggttctcaagacttttagtcaagccaggccaaggctcatgcctgtggtctcaactactccagaggctgaggcaagagaatcgcctgaggccaggagttcaagaccagcctggacaacacagtaagatctcacctcttaaggaaaaagaaagacttccagtcaaagggtgtcttaagtcaggtttcttctccaggcaaaggcctctggtgcatggtaacaaacaacgaccaaagccaggcagcccggggccttgggtgacctgtccagcgggcacccaactgtccccatgtcctgtctccacgcctcacacggcaccttactccaccacttcccagagggtcccgccagctgcccccacaatcgcgacactgcaggccccccgtgagcacagagacagcagctttagtaaggtcagacctagcgctacgcacacgtgccaggaatattctggggctcaagctcatttctgagctgctgctcagaaggaacacctgaaaacacaaccctgacagatgctgttttctttgagtctctcacgacacgaatgacagcttagtcagtcttggaaacctaaatgaaaatcgaactttaggcaaatacgactgagagctgacgctggccggctcgtagggaagctggctccaagcagatggcttcattctgtttctaaagaccctgcggcccagcggagagaaggcacgtgtgcaagtgtggcttcctcgtctggggttgtagagtggctttcaaatgcaaactgcctgagtgaaaggaagaaagctctagtaaggggggcaggagggatgctgtttagcagagggggatatcaattcactcaattatttaatggatgtatactttctgaagatggctctgcattttttgtttttttcttcccctagtgttttttatttttaattttttttttaagatggagtctcgctctgtcgcccaggctggagtacaatggcacgatctcagctcactgcaacctccacctccccggttcaagtgattctcctgcttcagcctcccgagtaggtgggactccaggcgcctgccaccatgcctggctaatttttattttattttactttatttatttatttagagatggagtttcgctctttttgcccaggctggagtgcaatggtgcaatctcggctcactgcaacctccgcctcccaggttcaaacgatactcctgcctcagcctccccagtagctgggattacaggtgcctgccaccatgcctggctaagtttttgtatttttagtggagacggggtttcaccatgttggccaggatggtctcgacctctcgacctcgtgatccgcccaccttggcctcccaaagtgctgggattacaggcataagccaccgtgcccggcctatttttagtacagatggggtttgccatgttggccaggcaggtctcgaactgctgacctcaggtgatccacccaccttggcctcccaaaatgctgggattacaggcgtgagccacggcccccggcccccttgtgttttttagaatttaacagcagagtccaagaaacggcataatctccagatgaatacactataaagttcacaattaaggtggatatagaagcgaaggaatacaaaaaattaagctctgtcagctcagggtgggattttttttctctttttttaaaaaaagagttgggggtctcgctatgttggccaggctgttctgaactcctgggctcaagcaatcctcccaccttggcctcccaaagtattaggattacaggcgtgagccaccgcgcccggccatcctcatctatttaacactaaaaagcccgtcacaggaaggcaaactccacacaggctggcctgccacacacactctgtctccagcagagggagctacagccctgggatgggagcctcaccttcccaccaattctgcatcctggggtgggaagcagagccgggagaccctcctggctcccttctctctgcctccctcactgctctgcaaagatgacaaaggttccttaggccaccttgaggttcacagccgaccctgggggcgcaatactaaggtgcccccaacaccctgggagacactatcttgcagagggaaaggaagcaatgcccccagcagctgtgtgcagaggtgagttccccctgcctgtggcccgtgtgtgcctgagagactagggaaggccccaagagagttgggtggctggaggcatgttctcaggcattgggggctccaagtggagcacaggcttccctcatcagggccatactggacacagacaggccgaggcagagcagtgcatgtggggtctagaggaggaggggagtggactgtgggccagtgaggttggttcccccggccctgggccctgcacagccagctcagatgccccagtgcagaatggggggcaataaacccacacactggcccactgacaggatcattcgctcagctggcacttaagtgagaggacttcagggaccacaggagactcttctggtgcagaccaggggagtttacaccgagtaactggcatcccccgaccctctccccagagcaaaggcagaatggcggcggccgtgcgagtgagccctgtccttcggcactgcccggtgccagggcgcgagtctgtgctaggctacaggaagctcccagggcccccatgaagtgcaaaggggcccttcccctcctcgggccccagcgggaacgaaggccggcagcggcagggccagtgcatgccaggtggggttcctacagccggaaaggaggaggaagagagactgataaggccgcccaccccaaagcacgcagctcaggggacgcaggacaatgtgcatgcccctctagcctgcaggccaggaaggccccacctgtgtgcacatgaaaggcgaggctctgggctgctgggggagtgctgctgttctctcaaaaagaggtcacctcagagcatgactttctgtggcccaactactcggtgttatttcaacatcacagccaaggtgcggcacacacagtctgtgtgggaagaatatgaaaaccacccatacaacgcatgggcctcactaggctcagggagtggattcttccctgctggttagttagcagactcctgctcctgccccaaacagagctgagcgatcctaaatcccctcagggtggcccgagctccctgtcccccaggcggggccacgtgcagggcttggcaaaggatgtggtggggcactagttcctagcctagtgcggcaggcgggccaggcagtagggccggagcacagccgtgggcgtgcacatgtcccctgctcatctctgcctgacggcatcacacaaagcccagagcccacatccagtgccaagacggactgggagggccagcaaagtggccaggattgcctgcccattagaggaattcgctgccatgtgctctgtgcactttagatgtgctccccagagaggggcatccgaattctggggatttgggccatcagactactgcaccccaaatgcctgcaacgaaagccacagtggacaaatgtgcagcagcctttttttttctttttctttttttttaagaaacagggtcttgctctgttgcccaggctgaagtgtagtggcgcgatcacggctcaccacagctgtgaactcctgggctcaagcaatcctcccacctcagtctcctgagcagctgtgatgacatgcccgcgccaccgcacctggctgcagtatcctttttttttttttttttttttttttttttgagatgaaatcccgctctgctgcccaggctggagttcagtggcgcaatctcggcttgctgcaatctccgcctcctggggtccaggcgattctcctgcctcagcctcccgagtagctgggattacaggcgcctgccaccacacctggctaatttttgtatttttagtagagatggggcttcaccatgttggccaggctggtctcaaactcctgacctcaggtgatccgtccacctcggcctcccaaagtgctgggattacaggcgtgagccaccacacccggcctgcagtgtccttttcaccccattcatgggcaaggccagcacatttgggtgcctgagggaaggtgctagaatctcttggcgttttcactgtacatgaaatgctggcctaatccccagctttttttttttttttttttaagacggagtctcgctctgtcacccacgctggagtgcagtggcaagacctcggctcactgcaacctccgcttcccgggttcatgccattctcctgtctcagcctcccgagtagctgggactacaggcgcccgccaccatgcccagctaattttttgtatttttagtagagacagggtttcaccatgttggtcaggctggtctccatctcctgacctcgtgatccacccaccttggcctcccaaagtgctgggattacaggcgtgagccaccacgcccagatatccccagcttcttttaatgccatcttacctcctcagcctcctcaaaccaaagccaacgtcttctcattttggtgctgtcctcgtttgcggaataactaatgacatttaaaatcaaacggtgatctgccttccctagaaaacccagcccccacctagagaacaccctccccacgcgtctggggcccctctggtacctgtagtctgatccacgaggacccgcgagttgatgatccgcccaaaccgagagaacatgtcttctacgtccttctgggtcatggtccgcgggagcccgctgatgtacaagttggcgtctttgatcacctctgagctcgggcgagcatacgacaccttgggaacacaaccactttccgagattagtacaggcacgtggccaaagcattgaggagggtgttgaatgctgggttaggaaaagccaacactgtgtgttagaaatcatgcagggaacgattatcatcactgacgctcaccgcctgcagccgcatggtggcaagctcactgagggatgggccgtgagccaggatgcctggcagtgcttcctcactgggtgctcaccatcctcaaggaggcaggcgtgactcctatgtcacaaagcccagcaactgagggcccgcagcttgtgtgtggctacctctctgatgtgctggacagtgagccggtgccagagaggtcctggtgcctgaaagcagcccgtgctgcagcgggcaagcaagctgggagctactgggaacacaggagactcccctgccaaagagcaagctcgccacagaagccctgacaggggctgtgagttctgggaggaccccgagtttgtactcaaatccactcaagtgttcaatattaaacgactcaatgccttttggatttatattttgcaaaatcaaagaaaactgaagagaaccttctgggtgctttgacaaaatggtacattcatcattcgtgtggagagggtggtgaggggagcccggaggccaatgcaagacaaggtcttcggtgctttctcaggttggcgctgacggccgtgcagaccccatgggcccagaaggaagaaaaggaccacagtggaacccctctgcctgtgaaggggcagcctggcaggactcacagcctcgtcaggaggctgggatatggaggagggagcaggagatgtgttcccgagaagggtggggacttgaacctgtgcgaaaggaagttcattccctttgagtgaggggcacagaactgatgagccaaggtaactgagaccagaacgcagggagaagccgccactcaggagtcactgggcagaatctgcgtgctgagaacacacacacagcatcctctgagaagctcctatcatgttccagagaaggaacaacagacattgcccctgctcatagggcagtgggcggcccagcaggggaacaggacagccccacgaggagaggagtgtggggctggaggccagctctgcctggtagcggtgggaatcgagggagcatgtcactacggagcccatgaggtctctggggaagccgtgctgctcccaggcccggggcacctccatcagcctgtggacaggagctctggggacacttgctcaccccatgatgtgggtcaggggctgccagtgctgtccccagagaaaaagaggctgccttggcccccagcctcccctagtgtccgggcttgccctggctccctgcagacctgtctggactggggcagtatttgggggcctgccaaaccatgaccctggcgccagtggagcggagctgaggctggcactgactggacctactgccgtccctggatgaagccccagaggagaagtgccctagagccaaatgctggggaaagctctgatgcctcccaaggacaggtgtctccaaggaccatgggaactctgctttcctcttctctctggacactgtcatgttcagtcaggctagaatcagaacagctggcgcacagcaggcgtgcactgacctggggctccccggcccctcggccagaaccctctttcctaagctcccaacatcgcttgctctttggcctcaatcaggtctttttctggctgcccattctcaagaattcatccagtgaggggttcaatcgtgttccccccaccccacaatccaaattcatatgccgaagtcctaaccccttgggacctcaaaacgtgacctgatttggatacagtcattgcggatgtaatcagttaagacgaggtcacactggtatagggtgatctctaatcaaatgtgactgatgtccttataaaagagggaaatttaggccaggtgtggtggcgcaggccagtaatcccactgttttggaggctgagtgggaggatcgcttgaacccaagagttcagcctgggcaacatggcaagaccccatctctacaaaaaaaattagctggtcgtggtggggcatacctctattcccagctactcgggaggctgaggtaggaggatcacctgagctcaggagtttgaggctgcagtgagccgtgatcacatcactgcagtccagcctgggtgactgagtgaggtcctgtctttaaaaaaaaaaaaaaagtatttttttttggctgggcgcagtggctcatgcctataatcccagcactttgggaggccgaggcgggtggatcacgaggtcaggagatcgagaccatcctggctaacatggtgaaaccccatctctactaaaaatacaaaaaattagccaggcatggtggcaggcgcctgtagtcccagctactcgggaggctgaggcaggagaatggcgtgaacccaggaggcggagcttgcagtgagccgagatcgcgccactgcactccagcctgagtgacagagcaagactccatctcaaaaaaaaaaaaagtattttttttgaaaacataaattcaatttagaaaggcgggaaatgtggatacaggcactctcacagggagaagtctgtgtgaagatggaggcagacactggggtgatgcttctctaaagcaagcagtgccagagaccaccagcctccaccagaagctgtgagagaggcctgtgacagatcccttcccagtgccttcaagagaaaccaaccctgctgacaccttggtctcgggcttccagcctccagaactgtgagttgatacccttcttctgttgaagcaacctggcctgtggggctttgtcatggcagctgagcaaactcctgaccactcagcttgccacagatccctccactggcatcaacgcccagttcctcctgtccctatttagttcttgactgcgttgatcatgacctgacacgctacattttttttttttttttttagttttttttgtagagacagggtcttgctatgttgctcaggttagacttgaactcctgggctcaagtgatcctcctgccccagcctcccaaatgccctggattacaggcatgcaccaccctgcctggcatctattttacttatttaacttttaactttgcaaacagactctgtgagggccagacttgtgtgtctcctgccatatccaaagcactcagagcagcctcaggtgaacggcaggcatctggggaccgctgctgcgtgagtggagtgcgcagtagccactgctgtgaagaacgcctgcctatctgcactgcagtccccggcgccggcttctgtgggtgacaggagttctgctgttctggttcctgaggcttggatctcacaatgtgctggggaagcctccaggtgacaatgttaagtgcctgtagccacatacagcacccggtttcacaccctggctttgcccctccatccctccgtgaccttggcagagctgtttcactactcgaaacatcagcttcttcaacccgaatctggggaccattttttatggggctgtggagagggcacgtgagatacaggatggaaggtctggccccgtcagcctttgataagcactggctgtgtgtggcacacagggacccagcagtgatgaagagctgcacacagagactgtgcagcatcccagcagggacactgagctgcatctgggacatgctcagcctgtcgcctccatgcaggaccactcccactgtggctgcctgggctgctactatgggaaaaagatagatagggatgaggagacaggactcctccttctccactctgccaccaagggaatgacatcaggaccaaagaggacagagcggacggggtgaaggcaaggcacgtctgcgctctctgtgcagggctggggcctcagagcccaggatgagcacaaggctccaggaggccctgcctgcaagggaggagcggggcagaggcttggggccagcctgcagttcccatgatgtgcctggccactgggtctcctctaggatgcggcccttgccttgtgcccctgcaggtcctgctgctcagaataccctcatctccaccctggtctggctaactccctctcctcctccagatctcaactctggctttcttgagggagcctcctctggcactggccactattataggctcctaagcccaccctgggaccaccttacagagaatggtgggcacaactgggctccccgaggatggaccatgggccagtgacccccagcacctggcagagggcttggccctagcccgtattgtcataaaggatttgtctggtctctgtcccagattcctaggaggaagcttgtaaaactcctggaatttctgtctttgttaccataaggccttggatcccacttgagtttgtgctaagtgatggctcaggatgggctccgacaccagaaagaccaagcatgtgactagacggctggggctgtgagctgggcgataccggcctgacctccagggtgggggaggggaaaggggtgctggggatggagttcgatcacatggccaaagagtcaatcggtcatgcattcgtaatgagcccagtaaacacggcagacaccaaagctccacggagcctcctggcaggtgcacaggtcacatgcagggaggactaggcacctgatcccaccaggtgcagacatgtgagctctgtgcttgggaccctccctgtgtggctcttcatttggcaggccctgagttgcaacctttataaacaaactgtcatcagaagtgtgagttccaggagtcattctagtgagtcatgcaccctgaaggggtggcgggaaccctgaatttgtagccagctggtcaaaagtgcaggggcctggggtcccccaaagggtgactggcatctgaggtgagggcggtcttgttggggaccgtggccttaaatgtgctggggctgtgctaactctgggtgactggtgtcagaatagaactgcaggacaccaggtggcatcagaccaagatgcaataaaatccaggatcagttgaacgcacaactccatccaggcccttatcacactgcacagatcagtcacctttaaactggggatggcaggggatccgaagtccctcagtatcaacgtatctggcccagcaccacactggccaggggctcagtaaaggtttgcggaatgaacacacttggagcacagaggaccccagggctgcgccgggggaactgctagaggagccaggcccagggagcctcggggagacctggggagaaattacttagggctgtcacgtccccatgaggctggcctgtttctgcagaactaggacagtggtgtgaagccactgagaagcagactctgccggcagagggcagggccgccgaaggtgaggcaggcttctgcatgcatggccgggatgacagggagggacacctgcccaggcctgggcccctggggtcccgtgaggctctggctccaaactcaggcagccactccagcctttcccaccaacatcaatcctagagaggcaagacagtcctgtttacacactgggcacccggctcctgcatctgagtaaacggaacagctgtgcaggaataatcaagcgttctgctccacacctcagcctggctgcctcagaaacaagaaccttcacacattttctaaataggggagagaattcctagatggggagtccagggccaaggataagccacctggggctggaggcgaggaagggctgcccctgctcaggtggaatcccatggcgcttggctgccctcaccagcccccaccggggaaggtgcctctgaggacctgcactggacacgaggaggcaggagtggcgcgcctgccctcagggagcccactgcacaccacgtccatgcggcatggggcaggtctgggagagctgctgctgagccagggtttggccactgagtaaccaagatcatggggcagtctgaaggcagggacagaggccagctgttggctgaaggtgctgtcactgtcaggtcacagaacccctcttggtgggcaggcaaaaatccaggctcccaggcccaccctgcagtgactcaggaggcccccctgtgaccatggaatctatatgttacagctccccaggaggccctaataattggcaggtccaagagggacccttcagggtgcctgatgtgactcagggagcacctttctctggggcaggggaatctagcagatctaaaggctcacacaggaccacctcattccaaatggccttggagcaagagaggggattctggccgggaagcccttacgtctgtgggtatcttgtgaaggcgggcactgagggcgggtgggtgcagtggctgctgcaggaagcccagttgcaggggcctgcctggggcacgggaggctcagggaaggctcagcagtacccaggactgacaggagaccagggagcaaaggtcggaaagacacgaggcttgatacaggtggcaggagctgcccacgaacccaggagccagaaggcagacacgtggggacgggggtaagtggggctcggggttgacagccccagtgcacgagagcgcgggtcagatgatgaggacagaggaaatccatctgtgtgacctggaggacctgcaactcatcccaggaagccactatggccctgctggaggtgctgcccctgggctgctgcacagttggcttcctcaagtcacctgccgctgtgaagcctccacacacggcaactgccggtcacacatggctatcctctgtcttgtttactgtctgcacccccgacccacgggggcactgaatttgtctgttttggtcactgtggggcacacagtaggtgctgagtgaggtgctgggtgagggaagggttacaactggccccaaggagcgcagagggagcactgggcaggctgggggtggatggagctgtccagggatgggaacacagagagccaggcaggagagacgacaggggaggcctgggagctgacgcaacctgggggcaccctgggcggggagtgggtcctgagacactcatgtaaggcctgggtcagatacacctgaccagggtatctgatgggagcccccgaggagcggctgtgctcatagtcccttggagagtgactgtgaggctgggcggggctcagcacagacctgtgcccagggcaggaatggatgcggtggtgatcagatccctttaccttaatggtttttgactggagcctcaagccgttcagcgtgttgatcgctctctctgcatccttcgcggtcacgtagttcacaaagccatagcccaagctgtgtcctgtgcaagagaacatgaagacattggtaagccaaccgtctgcgagtgagggacagggaggtcgggaagcactatatctgcctggcctttgggaaatgggattacaggtgctagcaaactttattttctttggcaaacacgtacattttctgcaatgaacacaggttcctttttttttttttttttaaagagataggatcttgctctgtcacccagggtggagtccagcgctgtgatcacagctcaccgccacctcaaattcttgggctcaagacagcctcccacctcagcctccagagtatctgggactacaggcccgctccagcaggcccaagctaattgttaaaattatttttagagatggggtctcactatgtcacccaggctggtctaaaacttctgggctcaagcaatcctcccacctcggccccacctcgacctcccaaagtgttgggattacagatgtgagccactgagcctggccaagaggttttacttttgtaattaaaataaccccaaaagttatttacaaaggagtattttttaaaaatactgtgctacggacagcatctttctgaaagaccagtcccgtgggtgccggccgctctgtggggcctgggtggtgaggatgaggaaggccacggcagtggacaggctggtgggaccccagtttgtgtcactgctgtttctctgccacttccttgtccagagcaggagggcctgctggcaccacccaccaccagttccatttacctttccaagcctgagaccagcccgaccccgctgtggggcagaagagtccagggagaggccaggggctgagaatccccagccctgccagacagtgggggagaaccaggttcacaggcagatgtccctgtaccccctttgtgaaacactcagcacaggtacaagtgaacacccactcactggataccatgggagggactcgggagggcaagggcaggaccagaggggacagcctctggggtcagggttcagaaggagcttcacaggacatttggccaaatgctctcactaaaggggaagtgaggaggcacagggaagagcgcaatccccgtctcccgcagcttatccatgcacttgcaaggctgctgaacatctgctgtgggcctgagcctcacccagcactgctccattcccccagccggcagagcgcgacaacgagcaggtcaccgaacaggaggtggcctggagccccactgaggcagagatcctcctggcagctgggccagggacatccagatccatctcaccgacagcaagattacaaatccagcagagagcctaacccaggtttgccactttctttttaaaatgaattttatttttcagaacagttttaggtttacagaaaaattacaaggataataccaagttcccatatggccccctcccagtttcccctatgggtaccaccgcaagtgagtatgaaatgctggtgacgatgaatgttcccattacctctagtccacgccccagccgcttccttagtctttccctcatgttctttcctgccccaggacctcatccaggatcccacgtgacatttagcagtcacatcccctcaggctcctctcgactatgacagtttcttgtttctcgtgactgtgacggttttgaggactggtcggacatcccgtagactctcgattgggtttgctggagtctgtcacagctggagcgcccttctcgtcacacgatgtcaagggcacaggccgtcaacgtgacttatggctgctggtgctgaccgtgatcactgggccgaggcagtcagtttgccaggtttcttggctgtaaagtgactcccacccctttccacactgccctccgcggaaggaagtcaggacgcccagcccacacttaaggcatggccctgacgtagcagctatagaaatgacgtgcagttagttctgcatggggcgctctctttcctaaagaacaaaaccaaaatcagatcctctagactcgtatttctaataaaactcctcagggctaagagactcagctctggggccctggacaaagtgagaacccagagcaccaagaccgtaggaccaggcccgtgtggagcgaattgggatcgcagcttggagaacaagcaacggagcagtgcagccaggtcaggactgccagggcctctgcaagtgctccagatggcagtgtgaaactggcaggtgtccctgcaccccctttgtgacacactcagcacacgtacaagcgaatacccactcactggacaccacgggagggactcgggatggcaagggcaggaccagaggggacagcctctggggtcagggattcctgtgatatggattcttgaccacgacgccagcctggctgggtttttttcactcctgaacacctgctctcgaagtgctcagcgccttctgcatccgggccccatctttctgctccataaacaagcctggaccacctgcctccttggctgcggcgcctcaggcagcctaagtgctgcttgagaaagtcacacactgatagggactcgagcaccaatgcccgttcctgtgtcctcagccacagccggttcctctcaacacagaaacatggtccctgcttggaccaagtccctgcttcctcatctcccaggtgctgggtgatcctgactggtcccctaggatggtcactgccctggggaccgtttcaggatgtgtcccctgagctttcggcagctcagggtagggcctaccctcttgggacacccctcctccaggatgtggaaaccacaccaggtttccgtctccctggctgtccctcctcaggctcctcactccctgtccattccatggagacccatgggccctgaggacccacctttggcccttgtctctgccacatgctcttcctcaccacacatgcccacacctgccaacatcaccgagggagtcgcacacccctgggctgcccgtcaccttccatggtcaagctcttctctgtcctcaaggagctgacgcattaactgagcacctactatgtgtcaggccctgtgcttggctgggagttagtgatgcatgacagaggacggtcgctgccatcatgaaagccatcacatccctgggggcaagtcagacaacatggtggtgagaaactgacaagcattaagacaggggtcaggagggcccgtcgcagaggagatattttaaacctctgcgtggctgacgtgagcattccagacagaagagcaggtgccaagtctccgaggcagagacaatgccagtgtattcccagaaagtagaggtggcccgtgtggcaagggcctaggaagtggccactggcagcagggcagagccagtgtggagccagcgggctggtgatctaatccagatgggagatgcaggctatgtgcacaggccagggcagtagaggaatgccccacccagaggacaggtagtgggggcaggcccctgatctccctacaggctgagccttgtgagtcaaggcctggcttcatccccagaatctgctctcctctctgtggtaggtgcctggaggcagcaggaaggcaggcaggtgagggatgaaggtgccctggtttccacccgctgggtgaggccatcactggaagggctttgtccagcacctgaccacccacctccacctttgcctccaatagaaacaaatctggacagctttctaagccaccactgactgcccaggcgacacccccaaccaatgaagtcagaaaaggaggaggtgggggggttgccagttggcctcagtggttttaagtcagggtctcagtctgttgccaagactcggctcactgcaacctctgcctcctaggctcaggcgatgctcccacctcagccccccaagtagctgggactagaggggcacgccaccatgcccagctaattttttaattttttgtagagatggggtttcgccatgttgcccaggttggtctcaaactcctgagctcaagcgatcctcccaccttggcctcccaaagtgctgggattataggcgtgcgccaccgcgcccagcctcctcagtggtttttaaagctccctagtgattccagtgcatgaggggcatggggcttcccatggttatgcagaggagaggaggcctccagaggagaagtgcaaacgggcccccaagttactgtttctccaggcagggtccacaagccacctgcaccaggggcatctggagttcaaggcaacaacttggctccctagatacccctaccccatcccgggacccaggatgtcaggcaggtgtgggaatccacatccccaaactccttacagatgctcctcctgcccaccagtggcagagcttgccaaagcccctgcctggagatgggagatcagccctgagacaggaggcctgagggtttgcgagggagcaggaggacagggagccaagctcagaggggcctggctcctgcacaggccgtggtgggcctgcctggtgtcagtgctcggggggcaaacggggcccctgggatgggagatgggatggagagggtgtgggtgggagatacggggaagcaggaaggagactggcagggaggaatgcaggatgcagaacccgggagtgaaatgcagggctgtcccagaggccagtgcatgcccggctctcacttccctcaactggaggaagagcctcctcaccctttctggccacaaggcagggtctgagagtcacatttccccaagtatcctgatgctgctgctggcccagggactgtaccctgaaagctgctgcctggagaagacaaagctgcctctgcggggagcaccatggttgccttactgggcacccatacaccgcccacactgggcaaacactggccagtgctctcgaacttccaaacacatttctccctctctttggatgagggttaagactggagagctgcttccttgtcttatgctgccagacacaatgcttccatccctccatgcttcttgcagctggaagcgccctgacctgacacggggtgcagggctgagggggcgagtgccctgtgggtgaagccctcctctgcaccgtgagggcaggtcccgtgagttctctctttaaaggctcaagggaagacctcactgagagacagagactggaggtggagactgaattaattcagcaataaataagaaacagcaaaggtctgcaaaagaaaagaaacaggcgaaggacaagaagggtattttacaaaagtagtacaaacaaccactaaatagaaacagtgatgaacttcactcgaaataggaatcaccctgatcggatgtcgctcgtccctcacagggtggcaaaggtgagaaatcctgccaaggctagcggatagcagggctggacagaaggaagggtgaactaagcgtcccctagagagcgagttagcgacagggaccaagagcctttaaaaggtgcgctctcccatctgccgcttcaccggcaggaagactttctatggaaataaccagtgagcaaagatttgtgccaggacatttatgtcagcagggctttcaaatatcaacaaatgggaagcagaatactatgcgaccgatgatgatgggatcgcgagatgttcagcgaagtggaaaaatgtccagatacaggaagggaagtttatccacagcctgagagaagagcccattctgtagaagtacgtggctgcttatggccatgaatacgtaaagaaaatcatttggagggacatgtgcccaaaagctaacagcggtatgattgtgggtgattttttgtttgtttgtttctgcttggctcatgcttaagtttttttttctgtgaggagcaaacatgactcatattaagaaaaaagccatcaggctgggaaagtccggaaggacattcctgcagagggaacagtgttcagagaatcacaagcgcccaagagtagagcctgaccggggggtgccgggggggggggagggtgcagcaagtggggagagggggcaggcgcccaggggtgtccctaccctcttgggacaccccctcctccgggatgtggttaaagccttgggcagcggtgtgggctttaacccgaccagagatatacagcaagacagaagccgtgaatggggctgcagcctggtggctccggcatgacaggtcatccatgagggtagagggctgactccttctgatcccccgagggacatatggggccactgtggagagaccagacactggggcagggctgcccaggaaggcagcgggcaggaccaccgggcgctgcagtggcctccttagctggtgtttgtgggtggaacagccaacaaccaaccaacgccatatccccaacatagggaccagggccaggccagccagaaacattccgagtcttgagagcagcacatggggcagtcccttcctcccagccatcatcacgcccctccttcctcccgccaccagtgcccagcccatggctggcactcaaccagtatttgctgaatgatgatctgcactctcccccatccccagcaccactcattcattcattccttccttcactctgcaaacaccgactggctatgtctagggctacggagattaacaaagctcctccctccaggagagatactcatgtgctggaccagaaagctccagctcagtgccaggtggaaaccccacagtgcaggtcggcccaggtgccataggaacccacagcggagcatctgacacttgggccaagggaggcctccttaagcaaacacgaccaggacctgaacggtttgaggaggggagtgacagggtcacatgcgggctgtcaaacaggcccctctgctgcagtgaggacagtggtcttcagggagcataggaggccagttaagaggccaaaacgacagtgcaggccaccagcagtggtgtcctgggctagaatggtggctgaggagagaggggaaagggatggactgaagcaacacccaggaggatgagagccaaggacacgcctagatttctgagcagagctaccaagtggatggtggtgccatcggctaaggtggggacaactggaaacgagtggctggctttagggagagtcaggtcagttaggaatatactgaatttaaggggccgagggcttctggagctcaggacagccttctggtcaaaaaggaggtggcagacagagggcagctgggagccatgaggtgactctgcccaccgtgagtgtcagctttggaagaagaggagaatgacataaccctctgagcataaccctctggcataaccggctgagtcaaaggctggggaaaggcgctaaagacagatggggcatggcctcaggggcagttagacaggtgggaggaggaggtgctcctgaaagccaatgggagaggatgcttctggaaggaggtggagacagggaacaggacagtatgtgggtgggaggccaacacacacagcagtggctctcgctaggggagactctgcctcccaggggacatgcggcaatgtcaggacatttttgggtttcaccactgggatgtcactactgggaccacgtgggtggaggccagggatgctgctcaacaccctgcagtgtccagtgcggcgtccagccctgacatcaggagccacagatgtggaggaactccgagctagaggaagctggaagtctggaaggaattcctttcaagacactcgaagcccaggaaaagtgggcacttggagagcctgaggctcttgggaagccgggaagggaagggaagggaggatcggggctggagagctggagacgctattagttccactgcgaagcgggaggtggtcatcagctgagggtgaagggggtggtcagaggaccgaggagggtaaacacggggaaatggctgctgtggggctcggagacacccgtgttgtgagctgagctaggccagggatcagattcgccggggtgcctgcctggccgggtgagaggctgtcttgggaggctgggagaaagccgttggctggggagaggggtggtgagacctagcgccgtgccccgggccctgccagcgaagaggtttgcccacactggcggcaggctgagcaaagccaggttgcagcatgttctccgtaaagctccagtcacttgaagggctgctaacaagaggctgggccaagatgaaagcccaggcccagccactccacaactcctggtgcgccagttactaactactgtccaaagataagacagggctcacctccgaactgaaataatttccaaattacacttttgcagccttcactgattctcaaaaccagttctctccagactgagccaaatctaggtgttcctttagcatagctcacattcctgtgaaaaccacaagggaacagacaaagaagtcaggttgcaggagaataactgcaaattccatgggaatgcttgcaatatctctggtgctcaggaatatcaaggaaaattcccttccaccagaaagaggaaaaaggtgagaattgttagtggcacaggagaattttaaaacccttctcttatttaggatggtctcctggagcaggagagagatgctggcttctagaacattctaacactgctcaagtttgtatactgtgtaaaatccccattgagaaggcgtttattaaatcagactcttggagttggaaggagagaaggctttcttattcagtgcctgcatctgaagagctaattccctgtagagcggccagacaggctctttgggagtcatgtgggggtcaggtgtcttaaggttactggggaaatgttgaagataaagtgcaatgatgggtacatcaggttcaacacatcactctatgttcatgtatgcctgaaatgtttcataatagaaacttttgttaactttttatttttgagacagagtctcactctgttgcccacactggagtgcagtggcacaatctcagctcattgcaacctccgcctcccaggttcaagtgattctcctgcctcggcctcttgagtagctgggattataggcgtgcgccaccacgcctggctaatttttgaattttagtatagacagggtttcaccatgttggccaggctggtctcgaactcctgacctcaggtgatctgcctgccttgacctcccaaagtgctgggattataggcatgagccaccgtgcccagcattcaacttttaaattagttttttttttttttgagacaaggtctcactatgttgcccaggctaaagtgtagaagacactttagtaccaagtggtacttggtaaggtgcaatctcagctcactgcaacctcaacccccgagactcaagcaattctcctgcctcagcgcccccaaatagccaggaccacagatgcgggccaccacgcccagctaagtttttgtatttttcgtaaagatggggtttcaccatgttgcccaggctggtcttgaacttctgagcaagtgatcctcccacctcgacctcccaaagtgctgggattataggtgtgagccactgtgcccagcctgaagtgagttttcagtatagggaatcacagtccccaaatccagggtggcagacagagccccgagaggactggccgctccttggcttcctaaagcagggcggagacagaaaggaaggcaggggggtaggggtgggtagagggaagaggaggaagaggggccattgggagaggaggaggaggagagctccgcacatggtctgtccgtaattctctcccgagtccttgaagccatgctctcagaatggaggccactctgtaaggaaggccttcacaagtgccaggacctctgcaaacacctacgaggtagggaccaccaggatgtagaagccacaatctccacattccggatggggacacaaaggcttagaagtcccactgtgagggagtggaacagcagggcttttagctgccaggctcctgcccctctgagagttcaagctcagcatggtgcagaagttcaagttgatggtgttgacagtagacagagcagcccaaacataacgaagggctgtccacaaggtcctcggtgttctgctgacctgggcctgaccaagagtgggggcctggacagacaggggcaggcctacctgcacctgccctggacagtacactcgccagggtcccttccacacgtgggacccaatcaatctgcccaggccaagccaggtcaggctgtggttctccagccccttccagctctcagaatgccctgtctctggttccttcctctcctcccactgtcttattttgtacatgctctctgtcttacaatgaatttttcctcttttgggaacttatgtccgatcttatacaagagcaatggacagagtttgaaataaaaatgaaacttcacagccatcgtttcaaggctgtagttatcctgcactgaggaatgccacagagtcacaggcaaaggagacagtgcccaaaggatggccaccaatacccggtttactaaaacgcctccatttctttacctgctactttatcccgaataagttttgcagattcaacttcaccaatgctgctgaacaggcttcgtaactcatcctgggtcatgttctgagggaggtagttgacgatcaaattcgttctcccgatgtcacccctgcagtcttcggccatgtggtcttcataaccattagacattgtatttttcaaaaatctgccaagagaaaaagagcaagtaaattcaaaatgttcatattgcagtatatgaaggcaaaactagtaactgcatttgcacttagagattttctttctttctttttttttttttttgttttgtttttgagacagagtctcactctgtcacccaggctggagtgcagtggcacaatctcggcttactgcaacctctgcgtcccaggttcaagtgattctcctacctcagcctcctgagtagctgggattacaggcgtctgccaccatgcccagctaatttttgtatttttagtagagacggggtttcgtcgtgttggccaggctggtctcaaactcctgaactcaggtgatccacctgcctcggcctcccaaagtgctgggattagaggcatgagccacagcacctggccctgcacttagagattcttttctatgctgcatgttaacttacagccacacaaaaatctgcacatggatgtttacagcggcttcactcataattgccaaaacctggaagcaaccaggatctcctccaatgggtgaatgaatgaacagactccattcatgtggttcagctgcacaggggcatattttttgatgataaaaagaaatgagctattaagctaggaaagacatttaaaggaactttaaatgtatactgttaagtgatacactgtatgattccaactctatgaccttctggaagaggcacactacagagaaaaagatcaatggttgccagcgatgcaggtcggcgtgggggggacaacaaatagtggaacacgggattgtcagggttttagggcagtgaaactattttgcatgatatatagtggtggatgtgacaatacatgtttgtcaaaacccacagaatgaacaatatacagagtgaactctaatctgaattacgtgctttagttactaataatgtgtcaatattgattcaccaagaataacagaggtaccatgtgaatgtgagatgctaataatgggtgtggcggcgccatcacagctcacagcagccaaggctcctgggagatcctcaagcgatcctcacacctcagcctcctgagtagctgggaacgcaggcatgtgccaccacgcccggctgatttttaaaactttttgtagagatggtatcttgcccaggttaattttgaactcctggcctcaagtaatccttccatctcaccctcccaaagtgctaggattacgggcatgagccactgtgtccggcttctttctatttaaaaaaaattttattcagtcaatacttcattgtaatgctacagaacgagtgttctccacaatttttctgtaaacctaaaactgctctaaaaaatagtctatggacacaaaacagaacaactccaagttcactaagagggcttcggagagacctacaaacaattccagcaccacaatttaagatcctgtaaaaaagcctttgggttgtctctcgagagaattccagatttccgattgctttctccccatgtccagagcctgtggggtgtacctgaaccccacccctggacaccctgctgctgagggggcaggtaggcaatggtcctctgcacctgtttattcccaaagacacagtgagtgagctggaaagaggtgagggtttctctaccagtcagaggaacttggtcttcacagtttgcaggctttgaaatgtctttctcagttgctgaagtctttcctttcagtgataaacatcagagccagtgatgactttggagaagagtccagatcaatgcggccaagtatgccgagcccgccctgctgaaagtgcgccgcacactgggctcacttctcagaggcccctcatccctgcctctaaacacacaggtagtcatccctgtggatggccacccgcctggaggtctcggtgagagcccatccctttccccagatccctgttgctcaattctgttatgtttgaacacccagtgcccacggtcatgcgcctttggccttctttaaaaatagccttgccagcagttacataaaaatctgaacacacctctcatgtggagatttcctacctactccctgaatcaacgccgagggaagaattaggtctggtttctttcttcctggtagaaacatccaggtcttccctaccctcctactagtctcagacaatgtggaaaatcagtacaatttcctaacatttcttttatttgaggatgtcctatgctccctgctctttaaaaagtaggttagcatcaaaagccatagaaaaaaagactgaaaagtgagactccatgaaattaaaaacctctgtacagcaaaaggcatcacagacctagacgaagaggagtagcctagagaaaagattcactgcatattctattatttagacctgtggttttcacactgggccattctgcccccaaggggacacagggcaatgtctggagacatttttggttactgtgacttggtcagggccaggggtcgggggagggggtgctactgacacctggtgggtagaagtcagagagctgtaaagcatccttcagggcacaggacggccccacaaccaagaattatctaaccccaaatgtcagtactgccgaggttgggaaaacttgattcggaacatctacaaattggtaagggataaaagaagagacgtaaccaagagggaagtaggcaaaggatgtgagcagcaatttataaaggccttaaattcaaatggctcgtaagtccagaaaaagacactgaacttcatcttcgtgaacaatgaggaaaatgcaaaagaaaaccagatgctattttctgccagtcacatggaataaaatccagcgcaagatcacctgctactgatctgagtatgagatggtagaaccttctgactcacaactgcaggatctttctacagaaataatcacgcaagtgcaggagttcaagaccagtctggacaacaacgtgagaccctgactctcaacaaaaaataaaataatttagtgggcatggtgacccatgcctatagtttcagctactcgggagacaaaggcagggaggatcgcttgagcccaggagatcaaggctgcatgagccatgatggcgccactgcactccagcctgggcaacagagtaagactctgtctcaaaacaaaacaaaacaaaaagtgcaaggaaggcactacctcatggttcataagagtataaaactggatagaattctaaatattcgttaatgggaaatggctaaatttcaactttcagtagcagctcgggacctatagactttaatcatgagaaactccacgtgtctgttacaccatctgtggccacgagattttagaatagatcactggctcaaaaacaaacaaacagacaaaaacatttgctggaagctgatccaaacagaccacaagggttaacactgaagaattaaaatgcacattgaagcttgctcaaaatgtaattcaagcatttcccttctttctttctcttttttcctttacctttccttctcctcgccctttctctaagagttaggcatctactttgctttttccctcattctgctttcatggacggtgagatggacaatggctgtcccaggcttactgtccacagtgtggtatcctctaggtctgggaaaagtggacctcctgaaacacacatcatggcctgtggtacaaatctggcccattgcctgttgttataaataaagttttattggaatacagcttgtctcatttgtttatgtattgtctgtctatagatagttttgtactacaataacacagttaagtagtagcaaccgtatggccaaaaaagctgagaatatttaccatctggctcttcacacaaaaaaaatctgccgacctctgttttaaaatgtaaaaacataaaatttcttggagaaaaatctttgtggcattgggctggggaaagatttctcagacacaacaccaaaagcccacttcgttaaaaaaaaaaaaaaatggataaactggatatcatcaaaatttgaaacttttgctctgtgaaagatactgctaggagaattaaaatccaccaactggagtaaacatttgcaaaagggacttgtagtcagaacacttttttttttttttgagtcaaagtctcactccactgcccaggctgaagtgcaatgccataatcatagctcactgcagccacaaactcttgggttcaagcaatcctcctgcctcagccttctggctaattttttattttttgtcgagatagggtctcactatgttgcccacgctggtcttgaattcctggtgtcaagtgatcctcccatcttggcctctcaaagtattagaattataggcgtaagccacctcacccaacccagaacccttttttttttttttttgaaatggagtcttgctctgtcacccaggctggagtgcagtggcatgatctccgctcactgcaagctccacctcccgggttcatgccattctcctgcctcagcctcccaagtagctgggactacaggcgcccgccaccatgcccagctaattttttgtatttttagtagagacggggtttcaccgtgttagccaggatggtctccatctcctgacctcgtgatctgcccatctgcccacctcggcctcccaaagtgctgggattacaggcgtgagccaccacgcctggcccagaacacttttttttaagctctcaaaacagaagcaggctagtgtgctggctcatgcctggaattccagcactttgggaggccgaggtgggtggatcacctgaggtcaggagtttgagaccagtccggccaacatggtgaaaccccatctctacaaaaatacaacaaaaaaaaaattagcaaggcgtggtggtgggcatctgtaatctcagttactggggaggctgaggcaggagaatcgcttgaacctgggaggcagaggttgcaatgagccgagatggcgccactgtactccaaactgggcgatagggccagactccatctccaaaaaccaaaaacaacataatgagcaaacaacctggtttcaaaaatggcaaaagatttgaacagatactataccaaagaatatatatggatggcagacaggcacatgaaaagatgctcaacatcattagtcaaattaaaaccacatcgagacaccgctacccacttattagaatggctaaagcaaaataaaacaaaaaacaaccaacagcaacaaaacagacaatgtcaagtgctggcagggatgtggagaagccagaatattcatgcactgctggtgggaatgcaaaaatgtgaaatgtgacagccactttggaaaacagattggcagtttcttatggtgaaatatacacttagcatgggatccagcaatcctactcctagtattaaggcaatagaaaggaaaatctatattcacacaaaaatctgtatataaatgtgcagagcggcattattcataatcatccaaaactacaacaacccaaatattcttcaagccattcatggataaactgggatacaccatacaacagaataccacctggcaataaaaggtatcaccaattcatgctacttgtgtgaatctcaaacacatcttgccacatcatttctgtgccttcctggaaaaggcaaaaccatagggatggatctgtggtcgctggggttagggagtgaggggaaaagtcgattacacagggacaggaggagggagtatttctgtttgtgggagagcgaactttccaatctttattatggtggtaatcaaacaactttatccgtttgtcaaaactcagagaactctactcgaaaaaatgaattttcctacatgcaaatttaaaaataaattgtctgagtgtggcgactcatgcctttaatcccagcgctttcagaggccaaggtgggaggactgcttaagcctggagttcaagaccagcctgggcagcacagagagatgccatcattacaaaaaaaaaaaaaattaaaaattacccaggaatggtgatgcacacctgtatgcaatcccagctaatcggggggctcagctgggaggatcactagagcctgggaggtcaatactgcagttagctatgattgtgccactgcagtccagcgtgggcgacagagtgagatcctgcctcaaaaacaacaacaaaaccacaataaaaataaattttaaaaggtttaaaaagagaacttctgctttgcggccctgttcctcctgacactctgagtcaaggctgagcagcccctgcaggtcaagttcttggtcaactagtaacacgggagaaaccaacaacctgccctgcaaagcagtttcatgacgtttctgggcccccaccccactctctggaggcccttcccttgaccttctccaaatctgcatcatcaatcctgggccaaatcagcttctatcccacaagctccaaccacaactgggccttgtcaccactcaattatcactgactcccaagtcgtagccacttctgtctctcgaggtgcaaggcctgcactgtcctgcaatcaagatgctcacccctctggtattccctgtcagtggtcaccacccattgaggctcggcggtcacacgatgatgctcacggtcaggcatgccattaataagtggcagggccaggcctcaagttgtcatgacaatgcaactgtcaaactggcaaggcccttcacaatcggacccaggtggttctccagcctcagtcgccaccctcccttcccgctcactccagcttcttgccaatatgctacaggcctctgctttggctgttccctctgcagggcactagtgtcctctccttcacttcccagctcattttttaaaattagtatttttttttaaagagatgggggtctctctttgttgcccaggctggtcttgaactcccaagctcaagtgatcctcctactttggcctcccaaagtgctggaattgcaggtgtgagccaccatgcctggcctcccagctcacttctatttttacttatttttcttttgagaaagggtcttgctctgctgccaaactagagtgcagtggcataatcacggctcactgcagcctcaaactgcctcagtttcccaagtagctgggactactggtgtgtgccaccatacctggctgatttttaaatttttttagagacaggggtctcattttgttgcccatgctggcttcaagtcatcctcccacctgggcctcccaaagtgctgggattataggtgagagccactacaccaggctggctcatctttaaaaagctaccttcctggcctggcgtggtggcttatgcctgtaatcccagcaatgtgggaggccgaggtaggcggatcacctgaggtcaggagtttgagaccagcatggccaacatagtgaaaccctgtctatactgaaaatacaaaaattagctgggcgtgatggtgcatgcctgtagtaccagctactcaggaggctgagacagcagactcacttgaacgcgggaggcagaggttgcagtgagtcaaaatcacgccactgcactccagcctgggcaacagagtgagactgtctcaaaaaaataaaaaataaaaggccaccttcccccaggacaacaggttacttactctagttctcagtgcctccatgccattgctgtaaacctttgttactgtcccaaccactcctatcattatttgccttacactcaatgaccaatgtcagtggtgagaaccttgagggcccaggttataccattgccatctaagagtccccaggcaaagccagggtgtgtcacacagcagtacaggaggctgctggctctcagaccaggctggagtgcagaggcatgatcacggctcactgcagccccggcctcctaggctcaggtgatcctcccacctaagcctcccaagtacctaggactgcaggtgcgtgtcactacgtagtcctactaagtcctctatgtagttctgtctaagcttttttatgttttgcagagaggggggtcttgctttgtcacccaggctggagtgcagtggtgcgatcttggctcactgcaacctccgcctcctaggttcaagtgattctccggcttcagcctcccgagtagctgagattacaggcacctgccaccacgcccggctaatttttgtatttttagtagagacagggtttcactacgttggccaggctgctctggcactcctgacctcaggtgatccacccgccttggcctcccaaagtgctgggattacaagcatgagccaccacgcttggccgcttttttatgttttgtagaggcgggggcgggggggtgtctcgccatgttgttcaggctggtctttaactcctgacgtcaagtgatcctcctacctcagcctcccaagcactgggcttagaggtgagagtcaccgtcggtgcctggcctctgggagaagtcttgtttggatgatctctgaaggtttttgactccaatgcactattttaaacaatcctggttgtctatgtgacatcagtgatgttgttcacatccgtcgatcatctagcgcatatccaggggagagagatgtgtgtgtctttatgtgtgacagaaaaagagtgaagcagtgaggctgctttccaccaggcaagcatgagaatcactttcattgcaccatgacggagcaggtattctaaaccacttgagccagagcaaaactagaacagtcaaatctatcttcaggctcaatcttgacacttcacacatcatctgacagggcttggacccaataatgtttaaggtcctttccagatgcaacattctgagtcttccaggtaaaaaaggcttaggtcattcaggaaatgctctgctgccagaaaaaacccaaagcaccacctgacccagttataaatgccatgcaaggcaaggtctcaggtggacatggcaccagcttcttccaagcccctgcccatggcccacagaagggcaggatgcctggctggagcagctccagctaagtgacaattccctttcagccaggctgagaagcccggggcaggagcaggtcaggtgtggctggcctgtggcccagtccaggcaccccacagccctgctaagggctctggcttctttctggctggtcaaggccaaaggccactgcagggatctcacacagaagtgcaaagcaacagggcatggcaggaaaaaaccctgagctctggagcctggcaggcccgagctgggcactaagtctcctgctcatcagctgaactactgtgcagaagtcgctccccttcccagagcttcagcttcctccactggggatgtcaccccttgctccacagtgcctggtacagtgagtacctgtctctagtcccacttcatgaacaaaatcaaggcgaatgtatgtctccccaacctccctgtctgcagctacaaacaccttcatctcctctcctcctgtccttgccctctcttcaaaccgcctccgccccctgaattacttcatttggtggcatagccccacctgtcccccaagccacctctctctagcccttggacctaatcaagcaccatgtcctgccagtttgacatgtgagatctctcaccgtcctgccacctctctgccaccatccctattcagattcctgtcacctcctgctagaccgactcctaagtgggattgcaaactcagtgtctctaaacccagcttcatcttcttcctcctagtcactccccttccttgagtctgcctgtttctgttcatggtgacatgagtctggccatcgagctgttcaggattgttccctctcctgtgattccttcccctgacataaacgtctcactcttaaaaaaaattttttttttttttagagatgggatctcgctatgttgcccaggctggtcttgaactcctggccttgagcaatcttccaccttggcctcccaagctgttggggttacaggtgtgagccactacacccagccacagatgtctgtttgacaggtacctggatccagtcgcttctgagtagtctgccaatctttcctttccctggcacagacaaaatatcaaccacgtgccaggcacagagcaaagcatcaggcatacaaaatatagaagcagtcccagtcctgaccctcaagcggttcagccattacggggccacctcagtactgcaacagcctgtgactggtttctccttgtctccccccagcctctccaccagggtgagcagtgaactaaaactgctcagtagccacccctggcctacctgcagggtaacagccaagccctctgcccagtggacacctgagcactcctgccaccactacccatctcagccttcttgtccctaaagaacccacgtggttctttgaacacacgatgttctctgaacactgcgatgttcccacctccgggcttggctgtatcctaaaaagccccaccctattgtctttgcctggttagctcctccccaccgctactgcctcctctcctccaggaagcattctgggctctcctgtgcccacccaggtcccttttctgggcttccacatcagccagggcataattctcacagcactcatcagagtgggctgagatgacctacacacatcatgcacactctccagagcctagcgggggcccaggacacagcagcggagcagggagagtcgttcagaggagggagcgagcctcacttccctcccacaggctggcttccgttggtcttcccctgacccacagctcgggtcggccgcaccgcctcgctactgccacctaggggcgccagccgggcgctgcgcttctctcgccattcagccttgaattcgattcaataaactgaatgggatgggaacactaaggagggaacagttgattccggtgcgggtggaggaagagtggcagtcagacgaggcttcaaacggccagtgagctctgggctgagccatggagcataagcaaaggatctccaggtggaagagatctgtctccaggtggaggctgcaacaggcagggagggttagagtttggggtctacgtgcaggggcggggagggttagggtgtgaaggaactggcactccaaactaagggcttctagctttatcttttaagccaccagagaggtcaagaaaacgtgtcttttttctgcacaaagattttaaatcagaagggatacaattagatgtgcatttacagaacagaactcctgctggagtgtggaaagagggaagagatgggaagcggagagtgagagaggcaagaaattttcataaagttttttcataattctctcatttcttttacttgaaatagcaccatgggctgggcgcggtggctcacacctgtaatcccaggactttaggaggccaaggcgggtggatcacctgaggtcaggagttcgagaccagcctgctcaacaaggcgaaatcccacctctactaaaaatgcaaaaaattagctggacgtggtggcggctgcctgtaatcccagctacttgggaggctgaggttgcagtgagctgagatggcacaactgcactccagcctgggcaacaagggtgaaactgtctcaaaaaaaaaaaaaaaaaaagaaaaagaaaaaaaaaaaaaaagaaatagcaccatggtccgggcgcggtggctcacgcctgtaatcccagcactttgggaggccgaggcgggcggatcacaaggtcaggagatcgagaccatcctggctaacacggtgaaaccccgtctctactaaaagtacaaaaaattagtcgggcgtggtagccggcgcctgtagtcccagctactcgggaggctgaggcagaagaatggcgtgaacccgggaggcggagcttgcagtgagccgagatcgcaccactgcactccagcctgggcggcagagtgagactccgtctcaaaaaaaaaaaaaaaaaagaaatagcaccatgatctcagactcaacacatccagactgaaactctgtctgctcaaaaccaatgcatcaacataaacagtattatttccttccacatttgagacgttcgtgtatctcaacctctttgtgggcctcgaagttgcagaatttgataatagatcccagcacagaactttgcacacagaaaatattcgatgacaactggagtgccctggagccttgtgattataggagcagtacaatcgagtggttaagagtaagggttttgaatcagagggcccgagttcaaaccctggcgcagccactttagtgcatgagactggtcacatcaagtgacccatctaagcctcagtttcttcatctctaaaatggaaattaatggaaattataacatcacctgcctcaaggactgcagacaaacgtccacaaagtgtcaagcacatagtaaatcctcaataaatactggtggctatgtacaacatcatttattcagtgcctaccaggcacagaccacgcacaacgcaacgggatttccaccctcttcaatttgcaccacacttttgtccttcccattttatagataagaaaactaaggctcaacagagtcaagcttgttcgaggtcttgggagcatctcccagggcattagaacttttggaggaagagcatttagttcagtaatggttctcacctgtgcgtgtgagagtggaagagacccctcccccgcaacccgagccatctggcaatgtttggagatacttttgatcctcacgacttggagcatggggatactgctggcatctagtgggtagaggccaggaatacggctcaacttcctacattgcacagggaagcccccactaccaccacaaccaaaaactatctgaccccaaacatcagtagggccaacgtcgagaaaccctgctctagacagatcattctcctcatcttcccatttctggccatccggatcttagatgaacactttctagcaagggggctcagtcccaccacgggaagcccatgcagaagttgtgcagaagttcttctccacctgccctgcacacagtagggaccaaaacccattttaacaagccccgcagcccagagcaccggaaaaggaaggaagggcatccatcccccattgttcaactgtgtgcagcttgtgtttccaacaggcacacacacatattttacaaatcctaacgtcccacgccccacaaacagctttgttagagatggcgctcaaaaaaagatgcagtttagattttttttttcccccaggactcccgtgtatctactgaagggtttgcacacttctcaaaggacctcgcaccggccgcggtgctctgacaacgaccacaaaagaatctgtgggatttcccgggggagcaagcccgtgggccgtgacctctgcgcgctcaaagcgttcccggcgctcccccgtagctggccccactctcccgcccccggagcccgggcttccaaggcgaccggggcccccggccgtgcagcccggccccccggcgcatgcccacgccgtatccccctcgcccgtccctcgaggcgccagaggaatccggccccggggcctgtagccggcgcccacaccggcccgccccgacccgcccgccgcggccccagcgcgcgtcccctcccccggtccggcgcggcctgggcctcggccggtgcaggcccgcgggcgccccgcggccaggccaggcgagctcaggcctgccgcggcctaccccgtcgggcgccgccgaaggccccccaccgcctcacctggatgcgggcgggcgggcccggggctgctccggggcgggcgggaggcggcggcggcgcggcgctaacggctccgctcggcctcggtagcggtggcggcggtggcggcgacggcgacggcggcagcggctcctcctcagcgcgcacgacccgctccggcccgcggcccggacacgccccccccgcgcgcgagcccattggccgacgtccgccacggcgcgctgctcattggccggcgtagctgtcgcggcgctccggggcgcgcgggagaggcgggacttccggtcggcgccgcctgcgaagtgctccgcggccggcggagacgcgggcagccagcgatggccgcggagggggcgaactgggttccggccctcggaggctgacggaaggcggtggctgaggagcggcgcctctggttgagcgctcgccgtgtgtcccgcacctgtctgtcctgccgccgcccggtaaggtaggaaaggtcagcgcgccggggttacgggtacagaacctgggttcgaatcccggccccgacgtttccgcactacgtgccgttgggcaggagctgacgtcaccttgccgggcctcagtttccttctctggtgcgctgaggaggcggggcatggaacgtggtcagcgcttcatcggtgctggctctttgagcaagccagttcccgaaggctcagcatctcattcattcattaaaatgtcattgagcgcctactgtgtgtcaatcactgtatgggcagtgagcagaaaaaaaatacctggtcttattgggctaacattctaaaccagcgctggcctagaatgccctagtagaaatacatgcaagctacatgtttaatttttttttatgtaaagatgggctctggttctgttgcccaggctggtctcgaactcctggactcaagcgattctcctgcctccgcctcccaaagagctgggattacaggcatgcctgcactctgcctaattttttcttttttttttttatgatctgaaaataatagtctttttatttttatttatttatttatttatttgagacggagactcgctctgtcgccaggctggagtgcagtggcgtgatctccgctcactgcaacctccgcttcccaggttcaagcgattctcctgcctcagcctcctaagtagttgggcctacaggcgctgcgccaccacaaccagctaatttttgtatttttagtagagacggggtttcaccgtgttggccatgatgatctgtatctcttgacctcgtgatctgcccgcctcagcctcccaaagtgctgggattacaggcttgagccactgcgcctggcctacaattttgtttttctttttttttttttttttttgagacaggatctcactctgtcacccaatttggagtgcggtggtatgatcacagctaactgcagcctcaacttccccagctcaggcaatcaatcctccggcttcagattcctgagtagcttagactacaggatgtgccactatgcctggctaatgttttatttttttgtagcgatgaggtcttgctgtattgcctaggctggtctcaaacttctagacttaagtgatcctcctgctttggcctcccaaagtgttgggattacaggcgggagccacggtgcccagcctgtttctttttttaatcatattttcttagaagttttttttttttttttttttttttttggagacagggtctcactctgctgtgcaggctggaatgcagtggtgtgatctcagctcactgcaacctctgcctccctattcaagtgattctcgtgcctcagcctcccaagtagctgggatcacaggcgtgcaacatcacacccagctaattcttgtggttttagtagagatggggttttgccatgttggccaggctggtctcaaactcctggcctcaagtgatccacccacctcggcctcccaaagtgctgggattacaggcatgagccaccacccggcctaggaaagctttttagagattgggtctcactgtgttgcccaggctggagtgcagtggctgttcacaggtgcaatcatcccacaggtttaactcctgacctcaagcagtccttctgcctcaggctcccaagtagctgggattataggcacgtgccaccacacctagctcaattaaatgttaaatttaacatttaattgttaaattttatagtagccagcattctgggtcatcacggtgcaatagaagtataaacaaagcaggccaggcacagtaggtcacgcctgtaatcccagcactttgggaggccgaggcgggcagatcaccaggtcagtagttcgagaccagcctggccaacatgttgaaaccccagtctctactaaaaatacaaaaattagctggacgtggtggcaggagcctgtaatcccagctactcgggaggctgaggcaggagaatcgcttgaaactggaaagtggaggttgcagtgagccgagatcccgccactgcactccagcctaggtgaaagagggaaattacatctcaaaaaaacagtataagcaagccacagatttgtcagcgaggtatgtaatttaaattggtacattgttagccatgtttaaaaataagtaaaaagaaacgggtgatgttagttgtaatgtgttttatttaactcagtaggttgaatatgttattatttaaacatgtagtcaatattttaaaatacaggatgttttgcatctgttatctttccaaaatagaagatactttgtgtcctttttctttcctgcatgctttttttttcttatttttttgagacagagtctcactctgttgccaaggctggagtgcagtggcgggatctcggctaactgcaacctccccatcccgggttcaagcgattctcctgcctcagcctcccgagtagctgcgattacagacatttgccaccatgcccgggtaattttttgtgtttttagtagagacagagtttcaccatgttgcccaggctggcctcgaactccttaccttaagtgatccacccgccctggcctcccatagtgctgggattacaggcgtgagccaccgcgcctggcccctgcctgcttttgaaatctagtatgtatcttatactccacagcacagcacagcaccgcacatctccagtcggactggctacatttcaagggctcaaccatcacgcgttaccagtggctactgcatcagactgtgcagtgctagatggggagtcagaagagaaaccaagtgatttccatgtcaagtggtgaacaggctaagaagaaaagtaaattggggaaagagcatggggaatgtgggggttgctgtttgaaagaggatggttgggaaggctgaagagctgtcattcgcagagggacccaaaagaggtgagagcactgaacaaatagttacattcttcattgtctgccgcagtgctgtccagaagagcttcccacgataatgggcatgttccatatcagcaccgtccaattcagtagcccctggctccatggggttttctctctttgtttttttctgtttgtttttttttttaagacagagtctcactcttttgccaaggctggagtgcagtggtgtgatcttagctcacagcaacctctgcctcctgggtttaagcgattcttctgcctcagcctcctgagtagctggaactacaggcatgcaccaccacgcctggctaatgtttatatatatattttttgctttgttttgttttgttttgagatggagtcttgttctgtcgtccaggctggagtgcagtggtgtgatctcggctcactgcgagctccatctccctggttcacgccattctcctgcctcagcctcccgagtagctgggaatacaggcgcccaccaccacacccggctaattttttcatgtatttttagtagagacggggtttcactgtgttagccaagatggtctctatctcctgacctcgtgatctgcctgccttggcctcccaaagtgctgggattacaggcgtgagctgcagcgtccgacctatatttatatttttatttattattattattattattattattattattattattattattattattttgagatgaaatattgcactgtcgcccaggctggagtgcagtggtttgatctcggctcactgcaacctccgcctcctgggttcaagtgattcttgtgcctcagcctcccaagtagctgggaccgcctgctaccacacctggctaatttttttgtatttttagtggaaacaggatttcatcatgttgaccaggtcagtattgaactcccaacttcaggtgatccaccaacctcggcctcccaaagtgctgggcttacaggcatgagctgttgcacctggcctccatgtgtgttttgtagggttttttttttttttttgcacttggcacatggttggtaccattaaagaactgactttctggccagacaacggtggctcatgcctgtaatctccagcactttgggaagccaaagtgggaggataacttgaggccaggagttcaagaccagcctgggcaacatagcaagcccccatctctaccaaaaataaaaaaataagccaggtgatatggtgtgggcctttagtctcagctgcttgaaaggctgagttgagaggattcctcaagcccaggagttcgagactgcattgagttgtgatcatgccacaacatttcagcctgggcaacagagcaaaaccccatgtcaaaaaaaaaaaaaaaaactgagcgtaagtttttaattaattcaaatttaaataaccatatagggctagtcgctcctatagtggacagcatagggttggtatagtgttgacaagtcctctgaattaagtgggtccttcatggcaaatgctttatggacatcctcctgtgaaatcctagaaataggccaggtgtggtggctcacgcttataatcccagcactttgggaagccgaggcgggcagatcacgaggtcagcagttcaagacaagcctagccaacatagagaaaccccatctctactaaaaatagaaaaattagccaggcatggtagtgggcgcctgtaatcccagctactcgggaggctaaggcaggagaatcgcttgaacctgggaggtggaggttgcagtgaaacgagatcacgccactgcactccaacctgggcaacaaaagccaaactccatatcaaaaaaaaaaaaaaaagggaaaaggaaacgttttaaactgagattggggtgatgggcaacagagtgagactctgtctcaaaaaaaaaaagaccttattttttagaaaaatttagacccagcacagtggttcacacctgtaatcccagcactttgggaggctgaggcagcaggatctcttgaggccgggagtttgagaccaacccaggtaatatagcaagacccccatctctagtaaaaatttaaaaaatttgctgggtgtggtggcacacacctgtgctcccagctactggggaggctgaggtgggaggattggttaagcctgggaggtcaaggctacagtgagctgtgattgcaccactgccctctattctgggtgacagagtgtgaccctatctcaaaaaaaaaaaaaaaaaaaaagaaaaaagaaaaattttagatttacagaaatacttccaaagtagtagtagagagttaccaggcctggtgcagtggcaggtacttataatcccagctacttgggaggctaaagtgggaggatctctgagcccaggagttgcagaccagcctgggcaacatagccagaccctgtcctttttttttttttttttcttttttttttgagaccgactctcactctatcgcccaggctggagtgcagtggtgtgatcttggctcactcctatctgcgtcttctgggttcaagcgattctcctgcctcagcctcccgagtagctgggattacatgcgcccaccaccatacccagctaatttttgtatttttaatagagatgggttttcactgtgttggccaggttggtctccaactcctgacctcaggtgattcacctgccttggcctcccagagtgctgggattacaggcgtgagccaccagaccctgtgttaaaaacaaacaaaaaaacagagttaccattattctctattagtaacatattttagttacaaatgagtaacatattggtaacaaattaataatgataatttgttgcagttaatggaccaatactgatactttgctattaactgaaggtcagagtttatttagtcttcctttgtgttgccctagtatcttttttctctcccaggatcccacccaggagactatctcactttttttttttttgagacagagtctcgctctgtcacccaggctggagcgcagtggcgcgatctcggcttactgcagccttcacctcctgggttcaagtgatcctcccgtttcagcctcctaagtagctcggacttcaggcacctgccatcatgcgtggctaatttttgtatttttagtagagacggggtttcgccatgttggccaggctggtcttgaactcctgacctcaagtgatccacctgctcggcctcccaatgtgctgggattacaggcatgagccactgcgcctggccagtccatctcacttttagttctcttatctcattaggctcttcttggctatgacagattctcagatttccctagtttttgatgatcttgacagttttgaggagtgccggtcaggtattttggtaagagtgtccctcttttggaatttatctggagtttttctcataagatacacgtttttggcagcaagatcaaggtaataaagtatcaatttaatcacaccatatcaaggatacatcctatcaaatttattatttatttatttaaagagacagggtcccggccgggcactgtggcttacgcctctaatcctagccctttgggagacagaggcaggtggatcacttgaggtcaggagttcgagaccagcctggccaacatggtgaaaccctatctctactaaaaaagtataaaaattagctggatgtggtggtacacacctgtagtcccagctgctctggaggctgacgcatgagaattgcttgaacctgggaggcggaggttgcagtgagccaagattgtgccactacactccagcgtggggattacaggtgtgcaccaccatgcctagctaattttgtatttttcagtagtgacggggtttcaccatgttggccaggctggtgttgaactcctgacctcaggtgatccacccgtcttgttctcccaaagtgctgggattagaggcatgagccaccgtgcccagtccttttttttttttttttttttttttttttttttaatactgtggaaggaagtcactatgcgtagcccacacctaagttgtggaaggttatactctatttatttaagggtagactgtctacataaattttttttaattttagagacagagtcttgctgtgttgcccaggctggagtgcagtggtgtgatcatggctcactgcagcctcaacttcctaggctcaagagatccttccacctcagcctctctagtagctgggactacaggtgcacgtgatcacatctggctactttttgtatttttttgtagagctgggatctcactatgttgttcaggctagtctggaactcctggcctcaagcactcctcctgccttggcctcccaaagttctagggttatgatttgcatcgctacatctggccctacataaattattattattttttaagcttgtccacagctgaaacataagttttctagaatccttccacgtgggagatttatctcgctctcccccacttactaggtcattgaattatatcaggatggaatgctggatatttatttatttatttattttactctggagatggagttttgcccttgttgcccaggctggagtacaatggcatgatctcggctcaccacaacctccacctcctgggttcaagcgattctcctgcctcagcctcccaagtagctgggattacaggcatgtgccaccatgcccggctaatttggtatttttagtagagatgggatttctccatgttggtcaggctggtctcgaactcccgacctcagatgatccgcctgccttggcctcccaaggcagtgattaccgggattaccggcatgagccactgtacctggcctggatgtttattttatgctttgtgttataacccaatactactgtattttgtcggtcaaattgttccagctttggccgtctaccactctttaatttggctcctgtggccctttgacatatccccatcaatgtgtttttcagtggtttttttgtttgttcgttttattcgaagcagttccttaaactttgtggcaacacaaaatgctgcaggcctatcttgtgtatttctgcccttcgtcctagaagcagccatgtctccaagggggccctggttccttttagtagagaatgatattgaaaaccaggatctggggtactggaagtgctcattgctactggaatgttgtttctttagatctttagatcaccaatagcttttttgtttgtttttttgagacggagtctcgcattctcgcctagcctggagggcagtggcgcgatcttggctcactgcaagctctgcctcccgggttcacggcattctcctgcctcagcctcccgagtagttgggactacaggcgcccgccaccacgcctggttaattgttttgtatttttagtagagacggggtttcaccatgttagccaggatggtctcgatctcctgaccttgtgatccacccgcctcggcctcccgaagtgctgggattacaggcgtgagccactgtgcctggcctttttttttttttttttttttaagacagggtctcactatgttgtccaggctggaatgcagtggtgccatcttggctcactgcagcctcaacctcctgggctcaagccatcctcccacctcaacgtcccaagtagctgggactgcaggtgtgtgccactgtgcccacctaaatttttgtattttttgtagagacagggttttaccatgttgcccagcctggtctctaactcctgagctcaactgatccactcaccttggtctcctgaagtgctgggattacaggcgtgagccaccaaacccagcatcaatagctcttttcttttctttttcttttttttttttgtttttgtgaaagggtctgcactcaccagcagtgtgaccttgggcgagtcatttaatctctctgagttttagcttcctcatctctaaaatgggggtgggccagatgtggtggctcatacctgtactcccagcactttgggaggctgaagtgggcagatcatttgaggctaagagttcaagaccagcctggccaatatggtaaaaccccatctctactaaaaatacaaaaattagccaggcatggtggtacacacctgtaatcccagctattctggaggctgaggcaggagaatcacttgaacctgagagggagaggttgcagtaagccgagatggcgccactgcactccagtctgggcaacagagtgagactctgtttccaataaataaaaataaaataaggccggtgtggtggctcacgcctgtaatcccagcacattggaggcaaaggcaggcagatcatctgaggttgggagttcgagaccagcctgaccaacatggagaaaccctgtctctactaaaaatacaaaattagctgggcgtggtggcgggtgcctgtaatcccagctcctcgggaggctgaggctggagaattgcttgaacccaggaggcagaggttgcggtgagccgaggtcgcaccattacactccagcctgggagacaagagtgaaactccgtctcaaaaaataaaataaataaaatgggggtgatcacagtacaggtgatccttgaacaacctgggtctgaactgcacaggtccacttacagctggatttacttccacctctgccacctgtgagacagcgagaccaacccctcctcctcctcttcctagcctactccgagtgaagatgatgaagatgaagaccgttatgatccacttccacttaatgaaagatgaatatattttctcttcctaatgatttttttttttttttttttggagacagagtctcgctgcatcccccaggctggagtacagtggtatgatcttggctcactgcaacctctgcctcctaggttcaagtgattctcctgcctcagtctcccgagtagctgggattacaggcgcccaccaccatgcccggctaatttttgtatttttagtagagatggggtttcactatgttggccaggctggtctcaaactcctgacctcaggtgatctgcctgacttggcctcccaaagtgctgggattacaggcatgagccaccttgcctggcctcttcctaatgattttttaaagtacatcttgttttctctgtcttactttatcataaaaatatatgatacaaataaaatacagaatatgtgttaatggactgtgtatgttatgagtaagccttccagtcgacagtgggctattattggtggttaagttttgggggagtgtgtgttcaagggtcaaccgcacttcctgagggcactgtgagaactaagttaaataacccacttttacaatctttggaaccgggggcaggtggctggggctcacacctgtaattacagcactttgggaggctgaggcaggaagatcccttgaggccaagagtttgagaccagcctgggcaacaaagcaagactctgtctctacaaaaatttttaaaacttaaccaggcagctgggcgcggtggctcacgcctgtaatcccagcacttcgggaggccgaggcgggaggatcacaaggtcaggagatcgagaccatcctggctaacatggtgaaaccccgtctctactaaaaatacaaaaaattagccgggcatggcagcatgcgccggtagtcccagctgctggggaggctgaggcaggagaatggtgtgaacccgggaggcggagcttgcagtgagccgagatcgtgccactgtactccagcctgggcgacagagcgagactccatctcaaaaaaaaaaaaaacttaaccaggcgtgctggcatgtgcctgttgtccagctagtcaggtggctgaggtgggaggatcccttgagctcagaagtttgaggttgccatgagccgtgatcgtgccactgcactccagcctgggtgacagcaagaccctgtctctaaaaaaaattttctaaaaaaacaaaacccaggtctgcttggtctcaaagatctttatttgcctgctctgattgtgagataggaagttcttatctgattttgcccttttatttatttatttttttttgagatggagtctgtctctgtcatccaggctagagtgcagtggcacaatcttggctcactgcaacctccgctgatagcagattacacttttatttttagttttttatgagatggagttttgcttttgtcgcccaggctggagtgcaatggcaagatctcggcttactgcaacctccgcctcccgggttcaagcaattcttctgcctcaggctcccaagtagctgggattacaggtgcgcaccaccatgctcagctaatttttttgtatttttagtagagacagggttttgccatgttggccaggctagtctcgaactcctgacctcaagtgatccacccgccttggcctcccaaagtgctgggattacaggcatgagccaccacatctggctctgttttgctttttttttttttttaaatgagaagcatagtcttgatcctggggagtaggaatcggccacggtagttcggggtactcttgctgtccctctcagtccctgtctgttccttcagcacaagctattgtgagtccaggaggtcaggagacagagaagctgactgagcccaagtccctgttctagaggacatcactgccctgaggcaacgatggacacgtggacacataaatccacccaacgtgacaagggacgggcacagatcggcctcccatggagggcagtgttggggccacattaatccatgaggaagggtcggctaggcagagaagagaggtggggagttccagacagagggaccgacaggagtaacggcacaaatttgtcagggaggatcattcagggagcaggggtgccggttcggaggggagatcacagtgaggtggcactggccttgaggagccctggaaagtcgggcagagaagatctgatgtgatcccatagcccacgtagtcagcccacaacagcccgattcagcccatgcctgttttccggcggcccgtgagccaagaatgatttttccacagttggaaaaataacagtagcgttttgtgacatgtgaaaattacatgaaatgcaagtttcagcgtccataaagtttgacagtaacacagccacgcctctcctttgtgtgtggccaggggacgctcttgagctgtcatagaggcggaagtggtgcacaggacgcgcttcatggatgtgcacactgcctcacacggggccctgcccttccactgtccctgttctgaagttctttatgattgaagggccccaggtttttattttgcatcagaccatgcacattatgtcatgtagggtacacagcaacagagaccgtgtgccctagaaagccccgagtatttgctgtgaagcccttttcagaaaacactggtggatcccccgcagagacttccatgtcctgataccctggaacccatgaatatggtacctcacacggcaggcttaagggtctttttttttttctttaagagatagggtcttgctctgtcacccaggctggagtgcagtggcacgatcacagttcactacagcctcaaaacttttagtctcaagtgatccgcctggcttagcctcctgagtagctggggctacagacataatgcccagctaattaaaaaaaaaaaaaaatagagatggggtctcactatgttgcccaagctggttttattgaactcctggcctcaagtgatactcccaactcagcctcccagtgttgggattacaggcatgagccaccgtgcccaacctggttgaagattttgagatgggccaggcatggtggctcatgcctataatcccagcactttgggaggctgaggcgggcggatcatctgaggccaggagtttgagaccagcctggccaacatggtgaaaccctgtctctactaaaaatacaaaaattggccaggtgtggtggcacacgcctgtagtcccagctacttgggaggctgaggttgccgtgagccaaggtcgcaccactgcacttcagcctgggcaacagagtaagactccatctcaaaaaaaaaaaaaaaaaaaagagatgggagatcattctggatgatgtgggtgacccaatggcatcacagggtccttataagagggaggcaggatggtcagaatcagagattggaagaggctgcactgctggcttgaaggtggaggaaagggccacaagccaaggaattcaggcggcctctagacgttggaaaatgcagggaaatggattctcccttggagcctctagaaggaaccagccctgcgcacaccttgattttagaacctagtaagaactaatttcagacttctgaccccaggattgtaagataataaaaatgtgctgctttgggctggatgcggtggcttatatatgtaattccagcatttttgggaggctgaggtggacagattgcttgagctcaggagtttgagactagcctgggcaatggtgaaaccccatctgtacaaaaaataaaattagctgggcgtggtggcatgtgcctctagtcttagctacttgggagactaaggtgggaagatcaactgagcccagaaggctgaggctgcagtgagccatgatcgcaccacagcattccagcctgggcgacagagtgaggccctgtctaaaattaaaataaatagctgggcacggtggctgacgcctgtaatcctagcactttgggaggctgaggcgggcagatcacgaggtcaggagatcaagaccatcctggctaacacagtgaaaccccgtctctactaaaaatacaaaaaattagcggggcgtggtggtgggcgcctgtagtcccagctactcaggctgaggcaggagaatggcgtgaacccgggaggtggagcttgcagtgagccgagattgcgccactgcactgcagcctgggcaacagagcgagactcccatctcaaaaacaaaaaaaaaccaccaccaccaccaacaacaacaaaattaaaataaataaaataaaatagttgttttaagtcaccagggttgtggttatttgttacagtagccgcaaggaactaaaagggggtgggcattgaaaatttattggccgggcgcggtggatcacgcctgtaatcccagcactttgggaggctgaggtgggcagatcacttgaggtcaggagttcaagaccagcctggccaacatggtgaaaccccatctctactaaaaatacaaaaattagccgggcttggtggcgggcgcctgtaattccagctactctcaggaggctgaggcaggagaatcgcttgaacccgggaagtggaggttgcagtgagctgagaccatgccactgcattccaacctgggcaacaagagtgaaactccatctcaaacaatatatataaaaatacaaatacaagtacaaaaattagccgggcatggtggcacatgcctgtaatcccagctacttgggaggctgaggcaggagaaaggcaggagaatcgcttggacccaggagtcggaggttgctgtgaggtgagatcgtgccactgcactccagcttgggcgacagagtgagatctgtcttgaacaaacaaacaaacaaacaaagaatttatcttttaactgaaagagtttaaaactgagagacttacgtgagtctctctctctttttttttttttttgagacggagtttcgcacttgttgcctaggctggagtgcaatggcgtgatcttggctcaccgcaacctctgcctcttgggttcaagcaattttcctcctgcctcagcctcccgagtagctgggattacaggcatgtgccaccatgcggggctaattttgtatttttattagaggtggggtttctctatgttgatcaggctggtctcgaactcccaacctcaggtggtctacccacctcggcttcccaaagtgctgggattacaggcgtgagccatggtgcccggccgtctctgtctcttaatttctctctttctttcctttctttctgtctcccttccttccttcctttcttttcttttccctccttccctcctttctttctctttctctctccttccttccttccttccttttttccttctttccgcgggaacctggggcaagtagaagatacaacatgagaagggggaggcctccagggaggccatctagacaactgaaagagagacggcaaagtggactggtggccggaggagtgctggagggttctggagagaaggaggctgattccagatgtttaagatgtggggtcagcaggaccctgggtgaccagtgaaatgtggagaaggtggcagccaggtcaattagagacagatgtgggggaaagccattctctctcagaattctggagggttccatatatgggatggagttattctggggacatcataagaaatgggtgtgcctgtcaggcgagcagttcacttgtcagcccccacacagagctgaagcatcatagcccaccccagttcactgcccactctgaaaacagaagccgggcaagctccaaaaagccggaagaaccttctagaagccctgtgttcttctgaggcccaacttcaatctgatgccatctcaagcgccagtgagatcggtcatagaagattagaggctttattttttctcaggcagttgagtttattttcaggttagcagcagtttggagttcgcttcctggatgaggtcagagttggaggggcaggtggccacagtgtgctgtgtgcagagtccttgcagccacgacactttggccgttctaccttgtgcacagttctgtctcaaagagactggccccaaagcaggcacagaaataccaggcttacttacttacttactttatttatttgtttatttttgagatggagtctcactctgtcgccaggctggagtgatctcggctcactgtaacctccgcatcctgggttcaagcgattctcgtgcctcagcctcctgagtagctgggattacaggcacgtgccaccacacccagctaattttagtgtttttagtagagatgggggtttcaccctgttggccaggatggtcttgatctcctgacctcatgatccgcctgcctcggcctcccaaagtgctgggattataggcgtgagccaccgcgcctggcctatttatttatttaagacagggtcttgctctgtcacccaggctggagtgcagtggcatgatctctgcccacggcaacctctgcgtcccagattcaagcgattctcttgcttcagcctcctgagtggttgagattacaggtacccgccaccatgcccggctaatttttttgtatttttagtagagacggggtttcaccatgttgggcagtctggtcgcgaactcctgatctcaaatgatcggcccgcctcagcctcctaaagtgctggaattacaggtgtgagccaccgtgcctggccaccaggcttaactttaggaattacttcactttccccagccgcagttcgtttatttgtacaaggcaggcagtaccggtgccaccacctcgagagcctgtttaaagcaggcaccgagcagggcacttaacgcaccttcttggtggctgtccagtaaacaacgtgggggtcagcgacccagagggcagcacagacctctccaccgcttgtcacagaattgcagcctctctaacaccacgcacaagataacacgggtcactggcctcagccagctcgggacgttttccagagttcactttctggatcctacctataacccttccattcctctctctttctctctctctttctttctttctttctttctctctctctttttctctttttttttttttttttttttttttttttggagatagagtgtcgctctgtcgcccaggttagagtacagtggcgtgatcccggctcactgcaagcttcgcctcccgggttcacgccattctcctgcctcaccccccaagtagctgggactacaggcacccaccaccacgcccagctaattttttgtattttttagtagagacggggtttcgctgtgttagccaggatggtctcgatctcctgaccttgtgatccacctgcctcggcctcccaaagtgctgggattacaggcgtgagccaccgcgcctggcctcttttctttttctctctctctctttctttcctgctttctctttctttctcccttccttccttccttccatccctctttccctctctctctctttctttcttcgatggagtctcattctgtcacccaggctggagtgcagtggtgcaatctcggctcactgcaacctccgcctcctgggttcaagtgatcctcccgcctcagccttccgagtagctgggactacatgtgcgtgtcaccacgcccagctaacttttgtattttagtagagatgggatatctccgtgttggccatgctggtctcaaacccctgacctcaagtgatctacctgtctcggcctccgaaagtgctgagattacaggtgtgagccactatgcccggtctccagaatattttcatcgccccagaaagaaaccctgtacccattacctgtcactccccatccctggaacccactggtctacttcctgactccacggatttttttactccggatacttcatataaatggaatcttatccagtgcattattttgtgtctggcttctttcactgagcatgtttttaaggttcacgtgctattgtagaaggagttagtacttcattccttttcagggttgaatgtaatttcatcctatgccggaggctgagtcaggagtgttacttgaagccaggagttcccttaggcaacatagcaagactctaactttaaaacatctttgaaaaattaagtccgggctgggtggttcatgcctgtaatcccagcattttggggggccaatgcaggcagatcacctgaggtcaggagcttgagaccagcctggccaacatggtgaaagcccatctctactaaaaatgcaaaaattagccaggcgtgatggcgggagcctgtaatcccagctactgaggaggctgaggcaggagaattgcttgaacctgggaggcagaggttgcagtgagccaagattgcaccactgcactccagcctaggcgacagagcaaaattccatatcaaaaaataaaaataaaataaaaattagctgggggttggcagggtgcagtgtctcacccctgtaatcttagcatgttgggaggccaaggagggctgatcacctgagaattgcttgaactcaggaggcggaggttgcagcgagtgtaatggtgcgagcttggctcactgcaacctctgcctcgttggttcaagcgattctcctgcctcagcctccctgagtagctgggactacaggtgcccgccatcacacccagctaatttttttttgtatttttagtagagacaaggtttcaccatgttggccagactggtcttgaactcttgacctcaggtgatcctcccgccttggcttcctaaagtgctgagattacaggcatgagccaccatgcctggccttttttcttttctctatttttgagatggagtctcactctatcgccaggctggagtgatcttggctcactgcaatctccagggttcaattgcctccagggtttgagcaattctcctgcctcagcctcctgagtagctgggattacaggcatgcaccaccacaccagtctaatttttgtggtttttatttttatttatttattttttgagatagagtttctctcttgttgcccaggctggagtgcctcgatctcagctcactgcaacctccacctcctgggttcaagagattctcctccctcagcctcccgagtagctggaattataggcgtccaccaccatgcccagctaattttttgtgtttttcgtagagagggtttcaccatgttcgccaggctggtctcaaactcctgacctcaggtgatccacccgcctcagcttcccagagtgctggaattacaggcatgagccaccacgcctggcctaatttttgtatttttagtagagatggggtttcaccatgttggccaggctggtcttgaactcctgacctcaggtgatctgcctgacttggcctcccaaagtgctgggattataggcgtgagccaccatgactggacttcttcctatttttttttttgttttgttttttgagaccgagtctcgctgtgtcgcccaggttggagtgcagtggcgcgatctcggcttactgcaagctccacctcccgggttcatgccattctccgcctcagcctcccaagtagctgggaatacaggcacccgccactgcgcccgtctaatttgttgtatttttttagtagagatggggtttcaccgtgttaaccaggatggtctcaatctcctgacctcgtgatccgcctgccttggcctcccaaatgctgggattacaggcgcgagccaccgcgcccggccccttcttcctattctttcaaagccaccagttgccctcctatgataacccattatctattaacccatggatctgttaacccaggaatggattaatcagttcatgagggcagaattctcatgacccagtcaccccttaaaggccccacctctgtcaacacggccacatcaaggattaagtttcaacgtgagttttggaggaaacgaacattgaaactgtggcaccaggtgttatcagtctattaagagctcatgcaaattgataagcaccaaaggtgcaaagatcagaaacagacaattcccaggaggataagcggggggtctaggagcctaagagtggatgtattgggcatcaagggagggcctgttggccagggttggtcacagcaaggatcattccaatgctgccgggaccccaacacttgctttctggccaggcgcggtagctcacgcctgtaatcccagcactttgggaggccgaggtgggtgggtcacgaggttaggaaatcaagaccatcctggctaacatggtgaaaccctgtctctactaaatgtacaaaaaattagccgggcgtgatggcgggcgccagctacttgggaggctgaggcaggagaatggtgtaaacccgggagatggagattgcagtgagcagagatcatgcgactgcactccagcctgggtcacagagtgagactccgtctcaaaaaacaaacaaacaaacaaaaaacacttgctttccaaaggggtggctgccacttcaattggaaagaccctttggacaatgcacacccagcatataagagggttcataggccaggcgtggtggctcacacctgtaatcccagcactttgggaggctgaggcaggaggagaattgcttcagtctgggagttcaagaccagccggggcaacatagcaagatcctgtctctatggataaaaaaaaaaaaggtcgggcccagtggctcacacctgtaatcccagcactttgggaggctgagacaggcagatcacctgaggttgggagttcaagctcagtagctctctaaaaatacagatcacctgaggtcaggagttcgagctcagtagctctgtaaaaatacagtaattagccgggcatggtggtgcacgcctgtaatcctggctactggagaggctgaggcatgagaatcacttgaacctgggaggcggaggttgcagtgagccaattgcgccattgcgctccagcctggacaacagaacgagactccatctcaaaaaaaaaaaaaaaaaaaaaaaagagggttcgtagtctgagcttgtgattataccactgaaaattaccccaagccacttgtggaagggctgcctgcagaaggacgtgtcttaggctctttaataagttaccttctggttggaaactacctaaacgcccagcacgcaggctggcccggtaaatcacgcacccataggagttatggtcaggaggcctgtgactctgtagagtggtagtggctcccgggccctgggccaagcgctgtactgatgccctcaaatcctcatggtaacagcctgttcagttctgttcaccccattttacagcaaggggctgctctgggggcagggaggagcccagctgggtgggagatcgtgggttcatggtggcatctgtgggtactccatccaatcaagggtctgaggcttaagaagcttaaatttgggggagatagggacattctcaatggtgcagttaaagcagtggcttcagattctggtgggagaggaaggaactgaggctggggaaagggatgtattggtcttttctttggaaacagtcttgctctgtcgcctaggctgggctggagtgtaatggcacgatctcggctcactgcaacctccgcttcccaggttcaagcgattctcatgcctcagcctcctgagtagctgggattacaggcatgtgtcagcacgcccagctactttttgtatttttagtagagacagggttttgccatgttgcccgggctggtcttgaactcttgggcaacagtgatccgcccgcctcagcctcccaaagtgctgagattacaggcatgagccatcgcccagtctcactggtctttcatctttgttccatcctcattcccattcagcacctgatgtacttctctcttactggggtgcaccccaggggacgcatgactgtgctacagcccacggggtttcagcagggtgcgcagaggacctcaggtggcccttgttacccacactcattccttgccaggtcttccacaggtcaaggagccaggattctggggtttggacaccccattctctggcggatggggctggcctggagcctgggtgggagtaccgggtttcatacatcgggggctcaggcttggggaggggtcacatggaagtcacctggctggccagagcagttgcagccacagcaggtagaaggcaggagccaggactgggtgggcctgcgtgggagggacggccaaaccctgaaactagcctccaccctccagggtacaggggcttccctggacacacactggccttcctcgtcctcctctttataccattgcacccaggtttgtttgtctgtttttagtgacagaggcttgctgtgtcacccaggatggagtgcagtggcacattctcagctcactgcaacctctgcctcccagattcaagcaattctcctgcctcagtctcctgagtagctgggattataggcatgtgccaccgcatccggctaatttttgattttttttttttttttttttttttttttttttagtggagacggggattcattatgttggccaggctggtcttgaactcctgacctccagtgatccacctgcctcggcctcccaaagtgctgggattacagacatgagccactgcacccagcccctggggttttatttacccagatccccactgcctttccttcctgtggctgacatctccctacactgtcccccagaaacacagctgttttgccctcaaccacagctcctgcatccagtgcagggcctggctcttgactgagacatcagcaaatgtgagccctgctctcctgggtcaatgcaggctccttcaggaaggaggcggggatctgtcccccttggcatccccagtgcccagcatggggggcctggcacccatgaggcagccaaggctttcagaccaaatgaacaagcagtgagccctgccttcgagggcccgtcttgaggacaccaggtgggtttatgacatcccagtggacatgaggcccccagggaccagttcctctccggcattggcaccagggcccctgccccactggatcagacctcccaagcttggggtcccttttccagtaggcaagagaggcacccgactcctgcttcagcccaaggagaacctgccgactccaaggggtggccattgaggggatcagtgacgtaagtccttcagaggcagcagggacaaggagctgtagggaaaacagggcaggcctggggttggggggtgtggggtgctgacaaggtgcagacccaccaccccaaccaagcccctcctccgcagatccatcacctctgccccgtgccccatgaatgaaccagctcattccccggcccagtgaccagcacaggctccagacgtttccctcggacattgtctgcctgaccacctcttccagcacagtgaggggcctgggatctggaggccagagtgggccaggcctaggggtggggggaaaaacgtcactattcttagatccctcgtcctccagggcccaggccaggcggagcagtcacattccagaggtagaaaccatcagcccacacaaatgcttgtgttccctgaggaggccaagggtcaccaggaactaaaatcagcttttcccaagaaaggcgggagacagggtggggggcggggggcagggttagaaaggccaaaggtcacccaataaacccttccagctgcccctggtggaaagcccctctgagtccggagggatgaggacagagggattctcgccctctaagctactctgcgggctggctgattcttcctggtagggggcggtcctgtgcagtctagattatttagcagctctctggcagcccaccgcccccccagcctcccagtggtgacagccaaatctctctccaggcacgggccaggtgtcccctggggaaaaatcgaccccagatgagaactgtactttcccaaacagagcttccaggtggcgtctggggtagatatttaggatcctgctgttctatggactctgttctctcagcctggaatcctcttcccgcatagcacaatcccccaccagccctgcaatcttccagaactaaacccacacatcacctccctcaggaagtgtcctgtgggccccccatcttatgattttggcccccacggatgctgtggtaggtaaaataaagcccctttggccagatatggtggcttacacctgtaatcccaacattttgggacgccgaggagggaggatcacttgagcctaggagttagagaccagcctggacaacatagcaagacacagtctctacaaaaaaaaataaaaaaattagctggggctgggcgcggtggctcacgcctgtaatcccagcactttgggaggccaaggcgagcggatcacaaggtcaagagatcgagaccatcctggccaagatggtgaaaccctgtctctactaaaaatacaaaaattagctgggcgtgttggcacgtgcctgtaatctcagctactctggaggctgagcgaggagaattgcttgaacccgggaggtggaagttgcagtgaaccgagatcgcaccactgcactccagactggcgacagagaaagactccgtctcaaaaaaaaaaaaaaaaaaattagctggggccgggtgcagtggctcatgcctataatcccagcactttgggaggccgaggcggatggatcccttgatgccaggagtttgagaccagcctggcaaacaaggtgaaaccctgactctactaaaaatacaaaaattagccgggcgtggtgacacatgccagtagtcccagttctacttgagaggctgaggcaggagaattgcttcaactcagtgggggcagaggttgcagtgagctgagattgagccattgcactccagccttggctacagagcaagaccctgtctcaaaaaaaaaaaaaaaaaaaaaatgctggtcttggtggctcacgcctgtaatcccagcactttgggaggctgaggcgggcagatcacctgaggttgggagttcgagaccagcctgcccaacatgaagaaaccctgttgctactaaaaaatcaaaattagctgggcgtggtggagcatgcctgtaatcccagctactcaggaggctgaggcaggagaattgcttgaactcgaggggcagaggttgcagtgagatgagatggagccactgcactccacccttggctatagagtgagactctgtctcagaaaaaaaaaaatgaggaggcaggagggtcacagtcagaaagagactggaagaggctgcgctgctggccgtgaaggtggaggaaggggccccaagatgagagctgtaggtacctctagaagctgggaaaggctgaaaatggagcctccaggaggaaccagcctcatcaacaccttaattttaggacatctgacctccagtgctgtaaaatcataaatctgggttgctttaagctgctctgtttctggtcatttgtttcagcagccacgagagactcataccagcctcttctctgcagccccgagtcagccctggagagctgccgggcagtcggcctggcatttgcctttcctggcatgagctttgtaacccggcagagctgctggccgtggcaagcatctcctaggagatgggagaactcaatggaaaaaggtttcagagtcagggcttgggtggaccacattccttcaagctttataccatagagagctttgttagggaggtggagaagcagacaaagtgactcgtgttctctccaatttatttatttatttaatttatttattttcagacggactctctctctgttgtccaggctggagtacagtggcttgatcttggctcactgcaacctctgcctcgtgagttcaagtgattctcctgcctcggcctcccaagtagctggaattacagacatgcactaccacacccagctagttttttggtatttttagtggagacagagtctcaccatgttggccaggctggtctccaactcctgacctcaagtaatccgcctgccttggcctcccaaagtgctgggattacaggcgtgagccaccatgcccagcccaaataattgttttaaaaggccaggctggtggctcatatctggaatcccagcactttgggaggctgtggtaggaagatcacttgagcccaggagcccgggattcccaggctgtagtgagctatgatcgggccactgcactccagtctggacgacagagcctacccccatccctgccccccgaaaaagttattcctataaagacccaagggcccaatctttgtttcatggtacctttgttctttatttcttactacttattcatttttaaatattctgaatagtcaaagtcaagatgtagctgactttgaaatgcttccctgccaggtgcaatgactcacacctgtaatcccagcattttgggaggctgaggcaggagaattgctttagctcaggagttcaagaccagcctgggcaacatagcgagatccctgtctctacaaaaaaatgacaaagttagctgggcatgatggtgcacacctgtaatcccagctacttgggaggttgaagtgagagggatcactggaccccaggagtttgagactgcagtgagccatgatcacaccactgcactccaccctgggtaacagagtgagaccctgtctcaatcaatcaatgaatcaacattttaaatatgaaacattttccacattcttcaacatgtcctagggcagtccttgttccctttccctaggacagctcatttttgaattttagaagcaatgctaaagggaaaatgtgtctgtgtgttttttttttttgttgttgttgttgtttgtttttgttttttttgagacagaatctcactctgttgcccaggctggagtgcagcggcatgatcttggctcactgcaacctccacctcctgggttcaagccatcctcctgcctcagcctccctagtaggtgggactacaggcatgcgccaccatgcctggctaatttttgtattttaagtagagatggggtttcaccatgttggccaggctggtcttggactcttgatctcgtgatctgcccgcctcagcctcccaaagtgctgggattacaggcgtgagccactgagcccggccgggaaaatgtgttttaagtttcagttaggccaggtgcagtggctcacgcctgtaatcccagcatgttgggaggcctgtaagaaataaagaggaaagaaacacaaaagttggcttgccagtcaacacaggtttattttagagaaaacaaacctgagaggagtattccaggcaagttgagtcagaggcaaactctcttacagactaagaggtttttttgtttttgggttgtttgtttgtttcttgtttttgttttgagacagagtttcgctcttgttgcccaggctggagtgcaatgacgtgatctcggctcactgcgacctctgcctcccaggttcaagctattctcctgcctcagcctcctgagtagctgggattacaggcatgtgccaccatgcccggctaatttttgtattttttagtagagacggggtttcaccatgttggccaggctggtctcgaacctcgtgatctgcccacctcagtctcccaaaatactgggattacaggcatgagccaccgagctcagcccagactaagagttttaaggattcagggtgggagagtttatcagaggcttggactgcttctgtgtctctttgttgtgcttatctgggagggagagttgcgtgtctgtccccatacatcttcttgcagctgcaggcatacccgccccccaaaaacccccaccgggagtctgcctttggcttccctgtttcagtgcacctgaagggaaaggaatgtgcttattaagtaaggccccactgttttactggggcccattgtatgagggtgaagtttggcaattacccaacagactttccccctatttccctctgtgcccgagctgtcttatctgtgttttactgcctgctctttctggctgcttgtagttagaagataagtgatatccttgaaatgtaagaggctagagagggagctggaacttaaagtggtggggtttgtccaagatgacagtgcttctgctctgtcattccagaccctatagttgtaaaaggacaaggggcgacgtgttctttctggctacttcctgctgttgtggggtggaggggagacacggagagttttttggtcttggattgcctgcaggagcaatattgtgtgtagatgttttggtagttgtctacgaaatggccataaagggtaaaaacattagtcctaggcttttcagcagcgtttttttttttttttttcttttgagacggagtctcgctctgtcgcctaggctggtgtgcagtggcgcgatctcagctcattgcaagctccacctcccaggttcatgccattctcctgccccagcctcccaagtagctgggactacaggcacgcgccaccacgcccggctaattttttgtatttttagcagagacggggcttcactgtcttagccaggatggtcttgatctcctgatctcgtgatccgtctgcctcggcctcccaaagtgttggaattacaggcgtgagccactgcgcctggccttcagcagcgtttcttattaggcctaattggttgagacagaatcaacatttttttcccaatgacaggcagaggcgcatgtttgggaagacccatgtgttatttgtttgttagcaactgttattcctggtatgaggataataactaagccaaatgctacggtaattgagactctgtgtccgatattccaccctgagggtactacagtatatagtccttctgcaaatagtagactaaagcaattcccatgagggtggcatagtaaataatttccattaaaaaggttttaatatttggcttaaaaggagatgtagaaatgacaaaaagtatttggtgaggtaggggtgagactgaaatgagtaatttccacttagttacttatcttttttttttttttttttttgagatggagtcttgctctatcgctcaggctagagtgcagtggcgtgatctcagctcactgcaacctccgcttcccgggttcaagcaattctcctgtctcagcctcccgagtagttgggattataggtgtccatataggtgttctatttttagtagcaacggggttttaccttgttggtctcaggctggtctcaaactcctgacctcaggtgatccacccacctcagcctcccaaagtgctgggattacaggtgtgagccaccttgcccagccacttatcttttatgattttcaggttaagatttgttatttttttttacattgataggacctttctctaggctgttaggggttgctttctccactctttaggctttgagtgtaatgtatccaggagttgatttctgtaacacatataatttaaactgtagaaaataataaaaattgaaaaacattaggcaagactagaatttaacaacaggtgtgctatagtttctgaaacataattttcactcttcagtttcccatttttattaaaagataaatcatggtaggactggtttgctttattatatttggcttaattatttgcatagagtgcagcaagaataattatttgctacataggccttttttttctctttttttctttttctcgagacagagtcttgctctgtcacccaggctggagtgcaatggtataatctcagctcactgcaacctccgcctgctgggttcaagcatttctccttcctcaccctcctgagtatcagggattacaggtgccagccaccaagcctgctaattttttgtatttttagtagagatggggtttcaccatgttggccaggctggccttgaactactgaccttgtgatctgcctgccttggcctcccaaagtgctgggattacaggcatgagccaccacacctagccgctacacaggccttttaaatcagctttgatggaactttgttatatagaaggaatttgagataagacttgtttaagccaagcccagccatggatttgtaacatgaaatacctatgagttgggtgaattcctctcctcttgaggttttaagataacttggggttcctggcctgtcagaaaatgaccttctttacttaccacagatcagaaaccctgtacaggaactgtatacacaaaatataaggccagtttccaagggctttattgactccataagtcactcaaggttaggagttcgagaccagcctggccaacgtggcgaaaccccgtctctattaaaatacaaaaattagccaggtgtggtggcatgcgcctgtaatcccagctacttgggaggctgaggcaggacaatcccttggatccaggaggaagaggttgcggtgagctgagatcgcaccactgcactccagcctgtgtggcagaaggagactccgtctcaaaaaaaaaaaaaaaattagctgggcatggtggcgggtgcttgtgaattgcttgaatccaggaggcagaggttgcagtgagctgagatcgtgccactgcactccaccctgggcaacagagggagactctgtctcaaaaaaacaaacaaaagaaaggaaattcacagtcaaatggacacctaccctatgcagcacccttaaccctttcagtagcagctaaaataggaagatcaggctgtgttgccttggcgtcccctggcctccgctatcagcccgggggtccaccatgcctcttcctgatgccagagataaggagggctgggggcaccaccttgaacaaacagcctcacgtcagaggtgatggaaagaaggctgtgatacagacactcatggggccgtgtttctgcagctgaaagagtgagagctgtaaggagcgggggctaaggctgttcagcttaaattgggagccagtgcaggggtttaggaccaggaggcgagagaggggacaatgaggcaggatgggatgggggagctggatttctttggcatgggggaaacttgagagcaatcctggcatttatccatctgttgccagagggagcagctgtggaaccagggaagggaaaacaacaggtggtcatggaagagagagggtgatgtatgaatcgtggttttaattttctgtgcttatgatactttagatctagggctttgaagaccaggagagggacggacggtcccttctggggctggccagttcctagagatagaaacacttccctccaagtgtgccttttctattctgttctgttctgttccctttccttttcttttcttttccttttccttttcttttcttttccttttccttccttcctttcctttatttcctccttccttccttccctccctcccttcctccctccttccttcctttcttccttcttcttggctttctttcttctttctttctttttttggctctgtcacccagtcgcccaagctggagtgcagtggtgccatctcagctcactgcaacctctacctcccgggttcaacaattctcctgcctcagcctcccaagtagctgggacaacaggcgcacaccaccacacctggctaatttttgtatattttttagcacagatggggtttcaccatataggccaggctgctctcaaactcctgacctcaagtgatctgcttgcctcagcctccaaaagtgctgggattacaggcgtgagccactgtgcccagcttcttctttctcttttctcttttctttctttctctctcccttccttccttcctttctctctctttccttccttccttctttctctttctctctctctctctttccttccttccttccttcctttctttctttcttcctctttccttcttttttgagacagagtcttgttctgtagcccaggctgtagtgcagtggtgcaatcacagctcactgcagcctcaactttccaggctcaagcaatccttctgcctcagcctccctagtagctgggactgcagatgtgtacaactatgccctgctcattttttttttaaagatggggttctgctatgttgctcaggctggtcttgaactcctaggctcaggtgatcctcctacttcaacctcccaagtagctgggatcacagatgtgtgccaccacacctggctaatttttaaattttttgtagagacaaagtctcactgtgttgcccaggctggtctcaaactcctgggttcaagtgacccttccacctcggcttcccaaagtgctgggattacaggtggcagccaccgtgcctggctgggaagcatttcaaagtcggctacatcttgacttctactattcaaaatatcaacaataaataaaaaataaggaacaggccgggagcagtggctcatgcctgtaatcccagcactttgggaggccgaggcgggtggaccacctgaggctaggagttcaagaccagcctggccaacatggtggttcactctccaagctctccaagctggtgaccttgggagctatatgttaaagatggcagagccagaagacggaagggacctgtgttctggaaacagccctcagagaagccctacctgccaatcaggaacattcatcatggactttacatgactgtggtggatggtatcatttgttcacaattgcctttgtttaaatgtatgtgtccctccaaaattcatacattggaactaaaaacccaaggtgttagtattagaaggtacagcctttggaacatgattaggtcatgagaactctgccctcatgaatgggattaatctcattagaaaaggctgggtgaggtggctcatgcctgaaatcccagcactttgggaggctgaggagggaaggattgcttgaagccagaagtctgagagcagcctgggaaacacagcaagtccccatctttgcaaaaaacaaaaaagttagctgggtgtggtggcatgctcctgtagtcctagctccttgggaggctgaggacttgatgattgcatgagcccaggagtcaaggttacattgaactatgatcacacccctgcactccagcctgggcaacatagcaagaccctgtctctaaaaaaagcaagagaggggggttgaaggggagcaggtaggtcctttttacctttctgctgtgtgagggtgcagcaagaaggctccaccttgggaggagagaatgagccctcacccaggtactgaatcctccagtaactccatcttggacttcccagcctctagaactgtaagcaataaacttctattattgacagattacctggcctcaggcattttgttatatcagcacaaagagactaagacaacacatcttcctctcttcctcccctgatcactgctccctgtgggtggggtgcactccccattctccagcttagggtgtggccatatgacttgttttggccaatggaacctgcatggaagtgaccctcatcagatcggagacaaaggctgaggaagcatcacgtggtcccgccactctgcttgcatgtcaccttgccatgaaacaaatatgggccctgatgggtcacctgaggtcaggagttcgagaccagcctgcttaccatggtaaaactctgtctctactaaaaatacaaaaaaattagctgggcacggtggcggatgcctgtaatcccagctacttggggggctgggaaagaatgaaactccatctcaaaaacaaaaaaacaaatatgggccctgaagcctctgaatgaaaagtcacatggaacagatgcaaatccaactcacagcctggagcaagttccagtggggctacaggtgacccccagacccacaaagggaaaatcattgctttttatttatttatttatttatttatttatttatttacttatttatttatttattttttgagacagactctgctctgttgcccaggctggagtacagtagcatgatctcagctcactgcaaactctgcctccgggttcaagcgattatcctgccttagcctcctgagtagctgggactacaggtatgcaccaccacggcccagctaatttttgtatttttggtagagatggggtttcaccatgttggccaggctggtctcaaactcctgacctcaggtgatctgcccacctcggcctcccaaagtgctgtaatccaccatggccaggcttattttatttttttaaaacaaagccaaacaaaacaaaaaaaacacttggggccaggtatggtggctcacgtctatactcccagcattttgggaggccaaggcggatggatcacttgaggtcaggaaaaatgtctctcctaaaaatacaaaaattagccaggtgtggtggtgggcgcctgtaatcccagctactcaggaggctgaggcaggggaatcacttgaaccagggaagtggaggttgcagtgagctgagattacaccactgcactccagcctgggtgacagagtgagactctgtctcaaaaaagtaacaacaatacttggcttggctaccctgatcaaatcacaaattcctcatgtgtagaatgggaataagtatattgtttaccttaatgtgtcactgtaagcatctattgcaacaatgcacatgaaattagcccagaacaagggaggcacacaagtaagtgtggggtgtagggggaagtgggaaagctgggggaaaggggggcctgacaagagttttttttaattttatttttatttttatttttattttatttttttgagacagaatttttctcttgtcacccagattggagtgcaatggcacaatcttggctcactgcaacctccgcctcctgggttcaagtgattcttctgcctcagcctcctgagtagctgggattacaggcacaaaccaccatgcatgctaatatttttgtatttttagtagagatggggtttcgctttttttttttttttttttttttttgagacagagtcttgctctgtagtcctgttgctctgtcgcccaggctggagtgcagtagcacgatctcggctcactgcaacctctgcctcccaggttcaagcgattctcctgcctcagcctcctgaatagctgagattacaggcacgtaccaccacgaccatctaatttttgtattttttgtagagacggggtttcaccatgttgatcaggctggtctcaaactcctgacctcatgatctacccacctcggcctcccaaagtgctgggattacaggtatgagccactgtgcctggcctgggtttcgcttttttttttttttttgtatttttagtagagatggggtttcgctatattggccagggtggtctcgaactcctgacctcaagtgatccacccgcctcggtctcccaaagttctgggattacaggcataagccactgcacccagccaggactgagaagagtttataggcctgtgaagggctggacaagctgagagctcccttgggcacttgggggcctgcagcaaggaggcttggtccactctcaagtctgaggtgcttgctcagcctctattggtggggaaggggaacatcacaggcaaagggatgactgaagtacatcccttccatgaggtttgatggccttgaagtggaggcacgtacacaataagatttcaggggcagacagagatgaatagggcagtcccggccaggcaggtgactcacgcctataatcccagcactctgggaggccgaggcgggtggatcacatggtcaggacttgagaccagcatggccaagatggtgaaaccccatctctactaaaaatacaaaaattagccaggcgtggtggcaggcacctgtaatcccagctgctcgggaggctgaggcagaaaactgcttgaacccgggaggtggaggttgcagtgagttgagatcatgccactgcactccagcctggtcaaaagagtgagactccgtctcaaaaaaaaaaaaaaaagaaagaatagggcggtcccaacatgtggcccagggtgacagggtgtcagagctcgaagctgaatacataatcccagccatgctggctgcctggagatgggcagagggagggcttgccaggcagagtgcgctactagggcaaaggctcagcaggagacaagcggaggtgggagccctgggggaacagcaggtgccgtgagagaagaggcaggaaagaggaaccgtggtgacccaatcttcctccccagcctcctctccagcacctcgcccccaggactgagtgggcaactggcagatctgaatccacgtgcttagaacaaccaggagaggccagagaaggtggctcatgctagtaatcccagcactgtgggaggctaaagtgggcagatggtctgagcccaggagttggaggctccagcaagctgtgataacaccagcactccagcctgggcgatagagtgagaccctgtctctaaaaacaaaaaattggccaggccacggtggctcacgcctgtaatcccagcactttgggaggccgaggcgggcggatcacaaggtcaggagatcgagaccatcctggctaacacggtgaaaccccgtctctactaaaaatacaaaaaattagctgggcatggtggcgggtgcctgtagtcccagctacttgggaggctgaggcaggagaatatcatgaacctgggaggcggagcttgcagtgagccgagatcacaccactgcactccagcctgggtgacagagcaagactctgtctcaaaaaaaaagaaaaaaaaagaaaaagaaaaagaaaatattggccaggcacggcggctcatgcctgtaatcccagcactttaggaggctgaggcaggtggatcacttgaggtcaggagtttcagaccagcctggccaacatggtgaaaccccatctctaccaaaaatgcaaaaattagccaggtgtggtggtgcgcacctgtaatcccagctactcaggaggctgaggcaggagaatcacttgaacccgggaggcagaggttgcagtgagccaagatcctgccactgcactccagcctgggcaacagagcaagaatctgtcttaaaaagggccaggcacggtggctcacgcctgtaatcccagcactttgagaggccgaggtgggcagatcacgaggtcaggagatcgagaccatcctggctaacacggtgaaaccccgtctctactaaaaatacaaaaagaaattagccgtgcgtggtggcgggcgcctgtagtcccagctacttgggagactgaggcaggagaatggcgtgaacccgggaggcagagcttgcagtgagcggagattgtgccactgcactccagcctgggcaacagagtgagactccatctcaaaaaaaaaaaaaaaaaaaaacagaaaaagaaccacaggaagacgggttggaggagcagaggtgaaagcgcagacagattccctaatcctataggcactgacagcctcctgggttccctttgtatgcatggccggcctactggactgccagggttcccacatttgagaagtaggtagcagtgggagggaggtttgtctgattctccagggagctaaggaggcggctcagatcgcccccgtcattccagaaagagagacctaattctaggatctgcccaccttcacccagtgggtccagcatgccactttctttttttatttttaattaattattttttgagactgagtctcgctctgtcacccagcctgcagtgcagcacgcagcgcaatcttggctcactgcaacctccacctcccgggttcaagtgattctcctgcctcagcctcccgagtagctaggattacaggcacccgtcaccatgcctggttaatttttgtatttttggtagggacaggggtttcaccatgttggtcaggctggtctcgaactcttgacctcaaatgatccacccgcctcggcctcccaaagtgctgggattacaggtgtgagccactgcgccccatcctgtttttatttttttcagaggcagagtctaactgtcgcccaggctggagtgctgtggtgcaatcatagcccactgcaaccttgaactcctaagctcgagcagtcctcttgcctcagcctcccgaatagctgtgacaacaggtccacactaccatgccctaccatgcctgggctgttgaatctccctgccctcacctcaccctctgcggcatcttccagatgaccttggcagagctcagatgcagacctgaccacaaccctcccctgactaaatacatctattcagggtgggtgcggtggctcatgcctgtaatcccagcactttgggaggccaaggcgggcggatcacctgaggtcaggagttcgagaccagcctggccaacatggtgaaaccccgtctctactaaaattacaaaaattagctctgcgtgatggcacgggtctgtaatcccagctactcgggaggctgaggcaggagaattgcttgaacccaagaggcagaggttgcagcgagccgagatcacgccactgcactccagcctgggccgcaggactctgtctcaaaaataaaaataaaaataaataaatcttttcggcagcttcttcttggcctctggatgaaggtcacccttctgggcttggcacgtgaggctccaaatagcttctccctgcctacctcatcttccgctatccacccccgcacctcctgccccagatactctgcacttggcagttccctctagcgtcctgccctgctggtctctgactaacacgaggttgtccttcaggtcaccattcagctgcaggtccccctggagacaggtgggatgcccttcacatccccacagcctgatgcagatgttcctccaggaatgtctgatcaggagacatggcagcctaaggcagagcaaggtggctcaggcctgtaatcccagcactttgggaggccaaggcgggatgatcccttgagcccaggagttcaagaccagcctgggccacataaggagaccctgtttctacaaaaagttacaaaattagtcgggcatgatggcatgtgcctgtagtcccagctacttgtggggctgaggcagggggatcgcttgaatccagaggtcaagactacagagagctgtgatcataccaccgcactccagcctgggcaacaggaacattatctcggccaggcacagtggttcatgcctgtaatcccagcactttgggaggccaaggtaggcggatcgcttgaggtcaggagttcgaaccagcctggccaacatggtgagaccccatctctactaaaaatacaaaaattagccgggtgtggtggtgcgtgcctgtaatcccagctactggggaggctgaggcaggagaattgcttgagcctgggaggcgaaggttgcagtgagccaagatcgcaccactgcactccagccttggcaacagagtgagactctgtttcaaaaaacaaacaaacaaacaaaccaaaaaacaaaaaaaaacccaaaaccaaaaacaaatcagagacattatcttgaaaaaaaaatcctcctattagctgtgagggccacttggagagtggtattatctgccttctgtctccagctctctgcacatcactgggcacctgtttttacttacttaattaatttgtttagagacaagcgacttagtcaagttacttggtcaagcaatgtaacctctctcagcctcggttgattgttctttccctataaagtaggaatgaattttaacctaataaggttcttgttacctcaagccactctctttaaaggcatccactagctgggcgtggtggtacatgcctgtaatacttaggaggctgaagtgggagaatcacttgagcccaggaggtggaggttgcagtgagccgagatcgcaccactgcactccagccagggtgacacagtgagaccctgtctcaaaaaaaaaaaaaaaaaaaaaaaaaaaaaacggcatccagcccatccctagtctcttccaatcacaccagcattggtgacagtgatcctcatctgaaaattgtttttaaattttttttaaattaaaatttgtttttccttgtcagcagaaagtcacatctgaatgtcttgcttcattacttgctgcttctcttgtctgcaatgctactaggcactgagcacgtgggactgactccttcactgcttgtccccagcacccagctcagtgctgggcacatagagggtgctcaataagtgtttattgaatgaataacaaatggtcccacatagatgttccatgaggcatctgtgacatcaacatcatcatttttttttttttttgagatgagttcttactctgttgcccaggctggaaggcagtggtgcaatcatagctcactgcagccttgaactcctgggatcaagcaatcctcctgccccagtctcctgagtaactgggactatagatgccggtcactttgcctggctatttaaaaaaaaaaaatttttttttttttttgtagaaatgggggtcttactatgttgcccaggctggtttcgaactcctgggctcaagtgatcctcttgccttggcctctcaaagtgttgggattataggtgtgagccaccacgcccagccagcgatcatcatctttgatagttgcaatgtgtcggcttgctcactgctgtcaccctggggcaccctggggccccgcatgtggctggaacataagggatactcagaaaacagatgtggaaagggtgagtagagctcagcacgttcaaagagggactcaggaccctatgggaccctctccccaaggcctgccaccctctctctccatgcaacccctcctctagcccaaggcagcagggccaggatcaggcagtcactcttcccagctgtctggcccccgcacatcctgcaggggcaggacaagtacaaggatgaaagccaaggtcatgagctcggtaataccagtagtctgaatccctctggagaaccacggcccctgcccaggccactgctacagctgtcccctggaagacagaggcctcaggttagcctggggtggggatcccctcagaactgactttccaggagccagcagagccagctacatcagggacttagggttcaggttagagttaaccaaattctcgaacatcaggccaagggcttgcaagacatcctggaaaaacccttcttccttcctcctccttctcctcctcctccccatcctcctcctccccctcctcctccttctcttcccactcctccttctcctccccccccttctcctccccctcctccttctcctccccctcctccttctccccctcctcctcttccccctcctccttctcctccccatcctccttctcctcctccttctcctcctccttctcctcctcctcctcctcctcctcttcctcctcctcttcctcctcctcctcctccttctcctcctccggttgctgggcaaccactatgcatctggaccaaagcaagaggcagctggtttaaagacacacatagactgaaagtgaagggaggcaaaaagatattctttgaaaatgaaaaccgaaagagatcaggggtagctgtacttgtatcagataaaatattttttaagtcaaaactctaacatgagaggaagaaggtcattatagaatgaaaaaggggtcagttcatcaagaggataaaacaattatatatatatgcacctaacatcagagcacctaaatatataaaggaaatatatataaaggaaatatgaacagatctgaactgcaatacaggaatagtactgcactttcaacaatgaacaccagcctgggcaacaggccacaaaattaaaaatatacatttgtgggttgtggtggtgcatatctgtagtcccagctacttgggaggctgaggcaggaggattgctggagcccaggagttcaaggctgcagtgagccataacaacatcactgtactccagcctggtggacaaactgagactctgtctaaaaaaaaaaaaaaaaaaaaaaaaggcaacgaacagatccaggcagataatcagtaaggaaacattggatttgaaatgcactgtagatcaaatggaactaatgacatatgtagaacattccatttgacagcagcggaacgcacattctcctcaagtgcacaggggacatactccaggatagatcatgttagaccacaaagcaagcctgaacaaatgtaagattgccaggtgcggtggctcacacttgtaatcccagcactttgggaggtcaaggcgggtggatgacgaggtcaggagatcgagaccagcctgaccaacatggtgaaaccccgtctctactaaaaatacaaaaaattagccaggtgtggtggtggcgggcgcctgtagtcccagctacttgggaggctgaggcaggagaatggcgtgaacccgggaggtggagcttgcagtgagccgagatggtgccactgcactccagcctgggcaacagagtgagactccgtctcaacaacaacaacaaaaaaacaaatgtaagattgcgattgtatcaagtatcttttctgaccacagtgatacgaaactagagatcaataacaggaggaattctggaaaattcacacgtgagaattcaacaacactctcctaaacaaccaatgtgtcaaagaagaaattaaaacgaaattaaaaaatatcttgaggccaggtgcagtggctcacgcctgtaatcccaacactttggtggctgaggcaggaggatcacctgaagccaggagttcaagaccagcctgggcaacatagtgagacgctccccccatctctacaaaaaataaaaataattagccaggcatggtgatgctcacctgtagtcccagttatttgggaggctaaggtgggaggaacacttgagttggaggctgcagtgagctacgattgtgccactgcactcagcctgggtgatagagggagatgtttctaaaaacaaaataaaacaaacagaaacaacaacaacaaaaaacttgagacaaactgaaatggacatacaatatacctaaaccaatgaatgcagcaaaagtggttctaagagggaagtttatagcaataaataaatgcctacataaaaaagaagaaagatctttcaaataaccaaattctctttaaaaagaggtaactggaggctgggcatggtggctcaagcctgtaatcccagcactttgggaggccaaggccagcaggtcacttgaggtcaggagttcgagaccagcctgggcaacatagtgaaatgtagtctctcctaaaaatacaaaaattagccagacatggtggtaggcgcctgtagtcccagctactcgggaggctgaggcaggagaatcgcttcaacccgggaggtggaggttgcagtaagccaagatcctgccactgcactccagcctgggcaacagagcaagactctgtctcgaaaaaaaaaaaaaaaagaggcagctgtgggtacaacaggagtccaggcctggcagacggggctcctggggtgtggattgctccctacaagactcgtgaccatgcagggcagtgggggcccatcagaagccaagagtctcatcagggacctggaggcaccagagttcaggagagctgcaggcagctggggtctgatatgcaaaagtgactacaggaggacccccacttctgcccatagtgttctcccagtgcccctgagcctttgccgatgacctcccagtcatctgctctatggcgcttccccattgggggactgtccttttcttcacagtatttaagaaataaaaattagattttcctggccaacaaaaaaagtaagtaacttggcttctctgaccctcaatctcctcctttgcacagttgggccaatggtgagcacccaggagcatccttcatcccactagaggtgcctgccactgggtagggcagatgtggtggtggctggtgcaggcttcccagaacatctcatcgcccctgcccaccacctggccactgcaaccaactgggcttgtctagaaagacacctgcctacccacccaaccctgcaggctctggggtattggtctctgaatttggctgagctacaggatggagaccaccctcaactgctcccatcatcagaggtgcagaacagaagtcggtgtggggggcacttgttccccccagctgtgctgatttcacactggcggagaagaggacccttgctgatagcggactgctcttttatttttttatgagatggagttttgctcttgttgcccaggctggagtgcaatggcaagatcttggctcactgcaacttccacttcctgggttcaagcaattctcctgcctcagcctcccaagtagctgggattacaggtgcgcaccaccatgcccggctattttttttttttttttgtatttttagtagagatggggtttcaccatgttggccaggctgatctcgaactcctgacctcaggtgatccgcccgcctcggcctcccaaagtgctgggattacaagtgtgaaccactgctcccggccgatagcggattactcttaatgcccccagctgctgcaggagtggaagaggccagtccagccccgactgtgaaggtctggcctttactcaaagcaactgtggtcctcagaactccgggatcatcccgtttcttgctccaacccctgggtcccaggtccccagcgcgcccaccccagtgctccgtgcttgctggtccctggagggcccccttactgggaacccttcctccccgtgaaggctgccggcgggacaaacagtgaggggtgaggcagggagggagactcacgttggggacctcccccaagtctgggtaacaccgtcttggccgcggcccgcgggttgggaaggtagggggcagtgagccgtagcggagaggctggccccagcccgccacgccgcttccccacgctcgcagccacgcggagccgcgtcctggtccagcctcacccacccagagcaagaggcggaggaactggaacagcgccccggcccgtgggctgccactggccgcagcaacgggacgggtgagagcacctgcccccgacgcgtcttaactgctctggtggggcggggctgaccgtgcaagccccgccccagtctaagcccctcctacaaagcccggccccttaccataagcgccatctgtcaggctccgcccactgtcttaaatcccactcactctgccctgcccctgactcggagccatatagcaagccccgcccatagccataagccacgcccacccagccctgcccctgggctctaagtgtcatttatctagtcacgtccccggctagaagccacacccaccaggcccggccccacctctaagccccactcacccggccatgtggtttgggacagggaagtaggctaggggccgccgcctctgggctcccagtggaaggggagaaatgagaaaggagtttaggatgtgataaatacccacagaggtcagatgtagctatggatgcaggcgataaaaagtttaaagcaatcagctgtgcggcctctgcagcgctcctttcgccctccctaatcttcacctcgtgtctcccccagtccctgtgtcctggctgggtcctgctgccccagggaaagaagacatgccttctcccatcctggctaacatggtgaaaccccgtctctactaaaaatacaaaaaattagccaggcgtggtggcgggagcctgtagtcccagctactcgggaggctgaggcaggagaatggcgtgaacccgggagacggagcttgcagtgagccgagacagcgccaccgcactccagcctgggcaaaagagcaagactccgtctcagaagaaaaaaaaaaaagacatgccttctcggtgaatgttgctttgcttcctgagggcatggctacccggggctcctggcttttcttccaaaaacaaaacatttcttccattttttctttttcttttgtttttttttttttttttttttttgagacagagtttcactcttgtcgcccaggctggaatgcagtggcccaatctcggctcactgcaacctccgcctcccgggttcaagcgattctcctgcctcagcctcctgagtagctggaattacaggtgcccccccaccacactcggctaatttttgtaattttagtagagatggggttttgccatgttggccaggctggtctcgaactcctgacctcagaggatccgcctgcctcggcctcccaaagtgctggtattacaggtgtgagccactgtgtccggccaccgtttttttttccattttttgagacagggtcttgctctgttgcccaggctggagtgcagtggcatgatcacagctcactgcagcctcaacctccaaggctcaagcaatcctcacacctcagcctcctgagtggctgggactacaggtatgcactactacgtcaggctaattttttaaaaaatttttgtagtgacgcaggtctctctatattgcccggggtggtcttgagctcctgggctcaagcaatcctctggcctcggcctcccaaagtgttgggcttacagacatgagccaccatgcctggcctagagagtttctttcttgttggggttgttcaccggtgggaggtgcaccattgtgccgtgctgactatattcatagagttatgtaaccatcactctcatctaatttcagaacaaaaggaaacccataccctctcacagtcagtccttcattctcccctccccccatcctgtggccaccgctaatttactttctgtttctatggatttgcctgtgatcacaaccagaggatttctgtgacatgctaagttacctaaccatggtgtggaaggagagggaaatggagtgaagttggggacccaccagggaacaggtggcttgagggcggggggagcatgaaggtaagggcttgtttgggggctcaaggcagtctgagccttgttcgcaggcagccagtgtccaccaggtgtgtgcaggtgagggaaacaggggaaaaggccctttctggagacagtaggggtgctggctgggaggcctgggatggggagtggggaggcaagggggcctgtgggtcgaggttggagcttgctgtagaagagggagaattccagaggctgagagtgcaggtggagaggaggaggaagggaggagggcgggcagggggtggctgggtggggctctgtctataaagagtgaagctcagcgtgttggtcctgcagatgggacagcttggcctacagcccggcgggcatcagctcccttgacccagtggatatcggtgagtcttttccttgaacatgactgagatgaacagcttttccctccagcacaacttgttcctactttatacaacctccttcccttgccatatgcctggggcttaagaggggggatgttcccagtacccactcccctcctcttcctcagtccttaccacttccctccacgaccccaggtggccccgttattcgtccaggtgcccagggaggaggacccgcctgcagcatgaacctgtggctcctggcctgcctggtggccggcttcctgggagcctgggcccccgctgtccacacccaaggtactgtgttcggcaatgcctaccaccaagtgcccctctccccatgcccccaccccaccccttttgtctcttatctcctccggaagtctccccaatcccatctccactgaattctcccgctcctgacatgcaggaactcctggtgtttggttagctcttgggatggggtcggggagatggagagtccccagttccttcttcgagagccccatggagtcttttgcaagactcctaaagatgtgagggagcagagggtggcttccagctgtgggcaaagccagttactgccagggatgtattgtagaatcctaatcctgccgagccaggggtggggttggagatcagggccctggagactgacaagagtggattcccatcctggtccctccatgcagtccagctgagagttagttgctcctaaaccatttttttttttttttttttgagacagagtctcactctgtcaccctggctggagtgcagtggcgcgatcttggctcactgcaacctccgcctcctgggctcaagcgatccttctgcctcagcctcccaagtagctgggactacaggcgtgtgtaccatgcccggctaatttttgtattttttagtagagatggggtttcactatgttggccagagtagtctcgatctcctgatctcaggcgatccgcctgcctcagcctcccaaagtgctaggattacaggtttgagccactgtgcccggcttcctaaacctttaggagcctccgtttcctcagctgcaaagtgggaatctaaaattcccactgcatggctctgacttgagggtccagtgagctcatgcctgcaaaagactaggcctcatgtctggcggcggcaatagtaactgttcctgttattaatagggaactctttccttcttccccactccctaccgcagagcaagcacttgaggatttcagtcgccaaaggacaattcctgggcctggggtgtccccacgggagccctgacactgggtcctacatcctctgagtttcagcagctggccaaagcagggtccctggctgggcggcagacccagggtcccaccctccttccctgtctgcccccacctgacccacctgcccctcggctgggtctgatgggtccaagtccttggcctttgcctgggaagggggttgggctgtggtctgattgttttgctatcagagccaggcccagcccagcccttcgatcctggcctccagccttgggaactacctgcctggcactgcagtccgaggttccaacagaatgcgctgccccttgccctcagaggccgcggttgggagacacctggagggctcgagtcctccctttccctgctcctgctgggctgggctctgcagggactcagactcggcctctggaggttagttctggcagaggtgagattgcagagaactccaaaggccatttaggcagagaattgcaccccagcttcctccactatctcatcagctcatcctcggctcattcattccacctgctcatccccccagaactttctggcatcacctcctcctcctctgggcaccccccacagtgcctgtgcttccccctttctgcagagatcagtttcccgggagctccctgaagacaacactaggtctaattcatctgtgtgtttcatctctgcttgtctagacattgacatttactgagagctctttactttgtattaaaacaattttttgtttgtttggttggtgttttgttttgtttcattgagacagagttttgctattgtcgcccaggctggagtgcaatggcgtgatctcggctcactgcaacctccacctcctgggttcaagtgattctcctgcctcagcctccagagtagctgggattaaaagcgcccactatcagccaggcacagtggctcacgcctgtaatcccagcactttgagaggccaaggcgggtggatcacaaggtcaagagatcaagaccatcctggccaacatggtgaaaccccgtctctactaaaaatacaaaaattagctggtcgtggtggcgggcgcctgtaatcccagctactcgggaggctgaggcaggagaatcgcttgaacccgggaggcagaggttgcagtgagctgaaattgagccactgcactccagcctgggtgacagagtgagactctggaaaaaaaaaaaaaaaaggcgcccaccaccatgcctggctaatttttgttttttgttttgttttgttttgagacggtgtctcactctgtcgcccaggctggagtgcagtggcgcgatctcggctcactgcaagctctgcctcccgggttcacgccattctcctgcctcagcctcccgagtagctgggactccaggcgcccaccaccacacccggctaatttttatatttttagtagagacggggtttcaccgtgttagccaggatggtctcaatctcctgacctcgtgatccgcccaccttggcctcccaaagtgctgggattaaaggcatgagccaccgcgcccggcctaatttttatattttttagtagagacggggtttcaccatattggccaggctagtctcaaactcctgacctcaggtgatccacccacctcagcctcccaaagtgctgggtttacaggcatgagccactgtgctgagctgccaatcagctcatttttaggagggaagaacttggctggggaggggtggtgttggcccctcctcacagtgcacctgcactccgagtcacccttttccccagagcaggagtagaggtggccttggtccgttcatttgctggttccacacccttcccagccgggacccaagggtcctctccaacctctggctgtcccaatatccagggataaggggtgagccaggaggctttttctttcctaaggctgttcctcagcctctgccgggcctggaagggttgtggtatgagcagacaggtatgcagacaggtgcccttgcctgtggctggccctgccaagttaacatgcaagggtgcgagtatctgggcggctgtgtggttgcaggtgtctttgaggactgctgcctggcctaccactaccccattgggtgggctgtgctccggcgcgcctggacttaccggatccaggaggtgagcgggagctgcaatctgcctgctgcgatgtgagtggggccgtgggggctgggggggtggggtgcacacacagccttgctgccagcctacaccctaacctgggcacccccctctgctcaccacagattctacctccccaagagacacaggaaggtgtgtgggaaccccaaaagcagggaggtgcagagagccatgaagctcctggatgctcgaaataaggtttttgcaaagctccaccacaacacgcagaccttccaaggtgggcaagacctctgctgggcatctagggggcctgccctccctgcctgcaagcccatgtgtggttcagaccccgagggagggaattggagaccagaatactgacacctgcctgaaccccaaacaaagccagttgctggtgagtggggcaccaagtgaatgaccaactgattgagtcattgtccagtttttgtttctggagatggggtcttgctctgttgcccaggctggagtgcagtagcatgatcatagctcactgcggcctcaaacttgtgggttcaagcaatcctcccacttcagattccccaagtagctgggattacaagtgtgtgccaccagtccagctcttttattattattttgagacagagtcttactgtgtcacccacgctggagtgcaatggcgccatcacagctcactgaagccttgacctcccaggctcaagcaatcctcctacctcagcctcctgagtagctgggactacaggcatgctccactaatccagctcattgttattttattttttatttttattttttgagatggagtcttgctgtgtcatccaggctggagtgcagtggcacgatctcggctcactgcaacctctgcctcctgaattcaagcgattctcccgcctcagccccctaagtagcaggagcacaggcccacgccaccacgcctggctaatttttgtatttttagtagagacggggtttcaccatgttggccaggctggtctcgaactcctgacctcagatgatctgcccgccttggcctcccaaagcactgggattataggcatgaaccaccatgcctggctccagctcattattattattattattttgagacagggttttactcttgtcacccaggctggagtgcagtggcacaatcacatctcactgcagccttgtgttcctgggctcaagcaatcctcccacgtcagcctcccaagtagctgggattacaggcacacaccaccatgcctgggtaattttttattttcattttgcagagacaggttgtgccatgttgcccaggctggacttgaacccctggactcaagcaatccacctgccttggcctcccaaagtgctgggactacaggcatgagccactgcacccagccagtccagctcttttaatcaggacactttccactggtacagatggaaagctcaagcacatgggagactcattggcttaaataaccagtcaacagcttcaggctcagctggatccaggagctcaaaggatgatggcagagctcttgcttatttctctctccatttctccagcaggccctcatgctgtaaagaagttgagttctggaaactccaagttatcatcgtccaagtttagcaatcccatcagcagcagtaagaggaatgtctccctcctgatatcagctaattcaggtaaggactcttggtcatgtgactgtctcccatccatcacctttgctgagggttgagggctcgtgattggctcacactgggacaggagattcacctccaggacccaggagaggtggttgtgcggtcagtgccgcagattcacaggggagggtcctcggtggctgtccactgctgtgactcagcgcaaagacaccacagcaagtgagaaagtaaagccccaggggagtggcccaagagctccagggccccccaaagccagcaattctccagcagggaccgggtggttgtcctgtaattctactgaattctgacattgtgtgtgtgtgtctctctctatatatacatataaaatatatataagtaaatatataatatataaacatatataatatataagtaaatatataatatataaatatatataatatatataagtaaatatataatatataaatatatataatatataagtaaatatataatatataaatatatataatatataagtaaatatataatatataaatatatataatatatataagtaaatatataatatataaatatataatatatataagtaaatatattatatataatatataaataatatataatatataaatacatataatatataaaaataatatataatatataaatatataatatataaataatatataatataaagtatatataatgtataaataatatataatatataaatatatatatttattattatttttttttgagatggagtctcactctgttgcccaggctggagtgcagtggcgcgatcttggctcactgcaagctccaccttccgggttcacgccattctcctgcctcagcctcccgagtagctgggactacaggcgcccgccaccacgctgggctaattttttgtatttttagtagagacggggtttcaccatgttagccaggatggtctcgatctcctgacttcgtgacccacccgccttggcctcccaaagtgctaagattacaggcgtgagccaccgcgcccagcctaaatatataaatatataatataaatatataaatatataatataaatatataaatatataatataaatatatgtaatatataaacatatatgtaatatataaatatatataatatataatatatataatatatataatgtatatatttatatataatatataaatatatataaatatatattatataatatataatatatataatatataatatatataatatataaatatatatattatatataattaatatttttttatggcagggtctcactctgttgctgaggctggagtgcagtggtgccatctcggctcactgcaacctccgcctccagggttcaggcgattcttgtgcctcagccacccaagtagctgggattacaggcatgcatcaccacgtctggctaattttcatatatttattagagatggggtttcgtcatgttgcttaggctggtctctaacttctggcctcaagcaattctcccacctcggccccccaaagtgctgggattgcaggcatgagccactgtgtccagctgacattgtctatctggaggtagtgacacaatccacaggttaaggactcagtcccacaagactgcccccatttcagatgctggttgcaagtagcaagttgtcactttatttctgactgattgtctgtaagtcagggcttccacctctggttggatcattcgatagaacagctcacaggactcatggaagcgctctacttgtgtttaccattttattgtaaaagattacaaaggggctgggcatggtggctcacgcctgtaatcctagcactttgagaggctgaggcagaaggatcaattgagcccaggatggccgggcgcggtggctcatgcctgtaatcccagcactttgggaggcggaggtgggtggatcacgaggtcaggagatcgagaccatccaggctaacatggtgaaaccccaactctactaaaaatacaaaaaattagccgggcgtggtggcaggcatctgtagtcccagttactctggaggctgaggcaggagaatggcatgaacctgggaggcgggccttgaagtaagccgagatcaagccactgcactccagcctgggcaaaagagcgagactctgtctctaaataaataaataaataataaaaaaattgagcccaggagtttgagaccagcctgggaaacatagcgggaccctgtctcaagaaaaaaaaaaacaaatttaaattagctagttgtggtggcatgcacctgtagtttcagctgcttgggaggctgaggtgagaggattacttgagcccaggaggtagaggttgcagtgagctatgatcataccattggaacttcagcctgggggacaaaatgagaccctgtctcgaaaaaagaataaaaagatattacaaaggatagggatgaataagccagatggaagagatgcttaggtaggcaaagactggaagggactcaagtgtagaagcttctgttcccgtggagttgcagtacaccacccctcccacacacggatatggtcacaagaccctgaaccccatagttcaggctttctttttttcagagatgaggtctcactctctccgccaggctggagtgcagtggcgcaattgtagctcactgcctaattgagcagctaggactacatagctcaccgcctcagcctcccgagtagctgggactgcaggccagtaccctcagcttaccagggatttttttttttttgagatggagtcttgctctgtcacccaggctggagtgcagtggcatgatctcggctcactgcaagctctgcctcccgggttcacgccattctcctggctcagcctctggagtagctgggactacaggcgcccgccaccacgcctggctaattttttgtatttttagtagagacggggtttcactgtgttagccaggatggtctcgatctcctgacttcatgatccaccagcctcagcctcccaaagtgctgggattacaggtgtgagccaccatgcccggcctaatttttttttttttttttttttgagacagagtctcactctgtcacccaggttggagtgcatggtgcaatcatagctcactgcaacctctgcctccagggtgggttcaggtgattctcctatctcagcctcctgagtagctgggatcataggcatgcaccaccactgccgactaatttttgtatttttagtagagatggggttttgccatgttgggcaggctggtcttgaactcctgacctcaagtgatctgcccacctcaactgtccaaagtgctgggattacaggcgtgagccaccacgcctggccttcaccagcaatttttttgtttatttgtttttatttttagtagagacggcgtttcactatgttggccaggctggtctcaaactcctgaccttgtgatccacctgccttggcctcccaaagttctgggatgacaggcgtgagccaccatgcccagccaaccagggaattttttagaagcttcatcacataggagtgaaggatgattaactccattgccaaccttcttccccttcctggagaatgggaccaaaagctccaagtttctaatcaatggcttggtcttgctggtgaccagcccccacccagaagccaaccaagagtcacctcattagaataaaatatgtccccattacccaggacactccaagggatccagagctctgtgtcagaaacagaattcaaagaccaaatattagcacaaaaggccaggtgcggtggctcacacctgtaatcccagcactttgggaggccgaggtgggcagatcacaaggtcaagagatcaagaccatcctggctaacacggtgaaaccctgtctctaaaatacaaaattagctactaaaaatacaaaatacaaaaatactaaaaatacaaaaatacaaaaaatacaaaaattagccgggcatggtggtactcgcctgtagttgcagctactagggaggctgaggcaggagaatcgcttgagtcctggaggcggaggttgcattgagccgagattgcgccactgcactccagtctggcgacagagcgagactgtctcaaaaaaaaaaaaaaaaaaaaaagttagcataaaagattctagcactcctattactcagaaattcacaagggttttaggagctgtagggactggaggtagagacaaatgcatatagttactattattttacagccgtcaattttacttcggcctctctcattgcttctgcaggactgtgagccggctcatttctgggctccatcggcacaggaggggccggatctttctccgataaaaccgtcgccctacagacccagctgtccccacgcctctgtcttttgggtcaagtcttaatccctgcacctgagttggtcctccctctgcacccccaccacctcctgcccgtctggcaactggaaagagggagttggcctgattttaagccttttgccgctccggggaccagcagcaatcctgggcagccagtggctcttgtagagaagacttaggatacctctctcactttctgtttcttgccgtccaccccgggccatgccagtgtgtccctctgggtccctccaaaactctggtcagttcaaggatgcccctcccaggctatgcttttctataacttttaaataaaccttggggggtgatggagtcattcctgcctgttacatttcttttttctttttttttcttgcctgttacatttcatgatgaggtgcaagttgctgctgccctgccctggggtgaagccaatgcgatctttgccaccccaagctctcctaacagacggctctccaggggccaagcattggtcactggttgcagaatgcacttcccagctggtgaccttaaaccaattgctgactctctgggtacctctcagcttgtctgtagaataagagtcactgtgcttgctctacttagattccagggctgtggtgagtccagccgatggacacagaagccctctgcaagctcttataggctgcctggaggccactggtaagccaggaccagaccagggacagagctctggtaccaggcgctagtgacaattctgcaggtggaggcctgagtcaccacccgatgatgctgtcttcagtccttggcaacctcagtttccatcacaacagagaatgatctggatgaaaaccaatgcacattgggccgggcaccgtggctcactctgtcatcccagcactttgggagaccaaggcgggtggatcacctgaagtcaggagttcaaggccagcctggtcaatatggtgaaaccccatctctactaaaaatgcaaaaattagtcgggcgtggtggcaggcacctgtcatcccagctactcgggaggctgaggcaggagaattgtttgaacccgggaagcagaggttgcagtgagccgagatcacgccactgcactccagcctgggtgacagagtgagagtttgtctcaaaaaaaagaaagaaagaaagaaagaaaaccaagcacatcatctcttaggggacaccctggtggtttgggatcagggaccgggatgaagttgcagaagaaacggagtcacgttcagtgttcgggctctaccgcgcactatgtgggtgacccggacaggttccacaagctctctaagcctcaattttgcccccctggaaaatgggggtgataatactgcctgcctcatagcgctttgttggagaccaaagacactgtgatgtgtgacacgcacagcacacagtacatgctaactgtgtgtttattaacacaatgagtaccctggccatcgaattggagtccgcctggaaccatgcatggtggtgtgggggctgatggcctgggaacatgcccacctttttttttttttttttttgagagagtcttgctgtgtcgcccaggctggagtgcaatggcacgatctccgctcactgcaacctccgcttcccgggttcaagtgattctcctgcctcagcctcctgagtaactgggattacaggcacgtaccaccacccctggctaattttggtatttttagtagagatggggtttcaccaagttggccaggctggtcttgaactcctgacttcaagtgatccagcctccttggcctctcaaagcactgaggttataggcgtgagccactgcacctggctgcccaacttcctcccctcccctcccctcctctttttttttttttttttttggtggagtcttgctctgttgcccaggctggagtgcagtggcatgatctcagctcactgcaacctctacctcctaggttcaagcgattctcctgcttcactctcctgagtagctgggattacaggcgcccacgaccacgcctggctttttttttttttttttttttgtattttcagtacagatggggtttcgccatgttggccgggctggtctcaaactcctgacctcaggtgatctgctcacctcagcctcccaaagtgctgggattacaggtgtgagccaccacaccccgccaggccacccaactttcaacctggcctgaccttggccaaagtgtttaacttctctgagcctcagttttccctgtaaaatggggatggtaatagcatctattccgtgaggttgtagtgacaatcaaagtggtcaataatggtaaaatacttggatactaacacctgtaattccagcactttgggaggccaaggcagtaagaccacttgagcccaggagctcaagatcagcctgggcagtatagggacatccccatctctaagaaaaataaatgttaggccaggtgtggtagctcatgcctgtaatcccggcactttgggaggccgaagcgggccgatcacctgaggtcaggagtttgagaccagcctggacaacatggtgaaaccccgtctctactaaaaatacacaaattagccaggtatggtggcacacatctgtagtcccagctactcgagaggctgaggcacgagaatcacttgaactcgggaggcagaggttgcagtgatccaagacagcgccactgcagtccagcctgggtgacagggtgagactctgtctcaaaaagaaagagaaagaaaaagaaatttaaaaaaattagctgggtgtggtggcgtgcacctttggtcccagctacttgggagaggctgaggtgggaggattgctcgagcccggaaagtggcgaccacagggagccacgatcgcgccactgcactccaacctaggcaacagagcaagaccctgcctcagaaaaaataaaaaaaaaatcgaatggtgtctggtatgtagtacgtggtcaggaagcgtgagccattattaccattctggggagcccataaggccttctgcttccccaggcacaagatctgcctcgcccagtccaagggcagcatctacttacttcaagaacttgccaaagggcaggcagacttaacccaaaataactttattatcgtctccacttttgatataaaagcattctccaaatggggggcaaatgtggcaagtcactgtggagtctgggccccctgtacacccttctactccgaggaataagccctgtgcccaccccagttgcccattgccatgtcctgccaaccccctgccccccgccagggcaagccacagtgcagtacagaagtgaaagcctgagattggccagacacggtgaccacagggcctcttcctgaccttggctgtgggggcagggggattgcacattgcagcttcttgctgtctccaggaaagactgagtaactggggggcccccggggctggcacagaggcccaggcagaggccgggcttgcctgaggttgtcgtgtagcatttcactcttcctgagtttcggggttcaatctggtcagccatcgcttctggggatcagtccttcccagttccagaatcccccttctctggacagctggggcccactgaggctcctcccaactaaagcaactgcagctgcaccttcagcctcaaggcctggccccatggccctggctgcccctctggctggacaccccagggtcctgccatgtggctcaccacctccagccggtaggttccaggccccggccgcctccgccccagctgcagggagctgacgccacggaggtgatgcatgcgaaagaaaccttgctcgtttccgcggacgatgacgtagcggatccggccctctagaccctccagggccggccggagctccaggatgcgctcggcccggcccaggtgtgagaggttcaggcccaaggtcagcagggcctcggagtcaagggtggccaggttcacctgggaagaaaggccaggtgtgtggtcagagcccaggagaatcgggatgtggtgtgggtagggggtcctcggattgtggccaaagaggagattctggccaatctctaaagtgaaggaaagagccataaaaaggaatgaaatcatgccatttgcagcaacgtggatgcagctggaggtcattatcctaagctaattaatgcagaaacagaagaccaaatacggcatgttctcagttataagtgggagctaaaaattgcatacccatggacataaagatgggaagcacagacactaggactactagagcagggagagagggagggagacaagagttgggaggccgggcgcagtggctcacgcctgtaatcccagcactttgggaggccgaggcgggtggatcacaaggtcaggagttcgagaccatcctgaccaatatggtgaaacccagtcgctactaaaaatacaaaaattagctgggcgtggtggcgggcgcctgtagtcccagctacttgggaggctgaggcaggagaatcgcttgaacccgggaggtggaggttgcagtgagctgagatcacgctactgcactccagcctgggcaacagaggaagactgtctcaaaacaaataaataaataaataaaaggaaaactacctattgggaactatgttcactgtttggatgatgggatcagcagaagcccaaactgcctcatcatgcaatatatccatttattaataacaaacctgtaccctctcaatctaaaaaaataggatgggcacaggggctcatgcctataatcccagcacttttggaggctgtggcaggaggattgcttgaggacaggatttctttgtttcttcttctttttcttttttttttttttttgagatggagtcttgctgtcgcccaggctggagtgcagtgacacgatctcggctcactgcaacctctgcctcctgggttcaagtgattatcctgcctcagcctcccaagtagctggaattacaggtgcctgccatcatgcctggctaatttttgtattttcagtagagacagggtttcactatgttggccaggctggtctcaaactcctggcctcaagtgatccgctcacctcagcctcccaaagtgctgggattacaggcgtgagccattgtgcctggccaaggccaggattttgaggtcagcatgggcaacatagtgagacctcatccacccacaagaagtgaaaatattagtactggtgtgcacctgtagtcccagctacttaggaggctgatgtgggaggtcccaggagttcgaagcagcagtgagctgtgatcacacctctgcactccagcctgggtaacagactgagaccctgtctcaaaaatatatatatgtttattaggcacctactgaattcctggcaatctttgaggcactggggatttagcaatgagcagataaaaatccttcccctcagggagtttaccttctagtaaagcaaagcagatagtagacaaataaatggaaaatgtaaaagtgacaagatgtgctacgaaaagacatgaagttggctgagggccaaggtggacagattgcttgagcccaggagttcgagaccagcctgagtaacctggtgaaactctgtctctactaaaaatacaagaaattaaccaggtgtggtgttgcacacctgtagtcccagctactagggaggctgaggtgggaggatcccttgagcctgggagttcaagctgcagtgagctatgattgcactgctgcattctagcctgggtgacagagtgagaccctgctccccaaaaaaaagaaaataaattgattttaaaaatcaataaataggctgggcgcagtggctcacacctgtaatcccagcactttgggaggctcaggcaggtggatcacgaggtcaggagattgagaccatcctggctaacaaggtgaaaccccatctctactaaaaatacaaaaaaaaaaattagctaggcgtagtgtcaggtgcctgtagtcccagctactccagaggctgagccaggagaatggcatgaacccaggaggcggagcttgcagtgagtggagatcacgctgctgcactccagcctgggcgacagagcaagactccgtctcaaaaaaaaaaaaaatcaataaatagggtgggcacggtggctcatgcctgtactcccagcactttgggaagctgaagtgggtggatcacttgagcccaggagtttgagaccagcctgggcaacatggtgaaccccgtctctacaaaaaatacaaaaattagctgggcaggtgtggtggtacatgtacctgtggtctcagctacttgggggattgaggcgggaggattgcttgagcccaggagttcaaggctgcagtgagctatgattgcgccactgcattccagcctgggtgacagagtgagaccttgtctcaaataaataaataaataaataaataataaatcaataaaaaaataaagtggaggaaaatactgcttcccttggcatctcaagtctggttgttcatccgcaaggtcagctggatctgtagactcagtggcataaggctgaggctgcttctgagagaggcagggaaacggccactgttacacactacagacccctagtcccagctgagggaccttgctcagacccctgccagcctgggccaaaggtatcaaagatttgctctcagagacccagcagccaggggattattcagatgacattgcgacccagagccctaaggtcactcagaaatgtcttgggatggctggtgttaggaacaagggcctttcagcagaagccagcccctaaaagaatgccagagctgacagtgagagaaacgggatgccaagcagggctggagaggagagcgtaaaggaccagacagaagagccgcctgatagcttccgctgtgcttcctgcatctggccctctttgagagccccttgtgtgccaatgacaaacccttctttatttaagctcctctgaagtgccttcctggtcttggcagctggacagggccctgaataagacagcgagcctcaatggcaggctaccccagggctgggtgacgtatccaaccccacagaaagtcatctgtgttttctttgcctttgttttagggagcactgtgttggtttggcctcatttacatgccgacggagtgttttgctgttgcattcaagtgaaagttattcctgttccccagcccctcagttctggagatctcaggccttcttcccacggaatgttgttaagacttatgctcttactgacccctgctggcagtcagtgggtattgcaggcaaaggcacaatacagccctatttttgagacagggtctgtctgtcacccaggctggagtgcagaggtgtgatcacagctctctgccgctttgaactcctgggttcaagcaatcctcccgcctcagcctcccaagtagctgggactacaggcacatggcaccacagctggctaatatttttactttttgtaggtggagggggtctcactatgttacccgggctggtctcaaaatcctggccttgactgggcacagtggcacacacctgtaatcccagcactctgggagtctgaggtgggctgatcacttgaggccaggagtttgagaccagcctggccaacatggcgaaaccccatctctactaaaaatacaaaaattagcccttctctgtcttgatctacttctgccctgggaccctgacaaccactcactcactcttattgagtaccaaggggtaccaatacagtagtaaatcctacagacacagctctacccttatgaagtttacagaaaatatcagtaactatgggataatatatacatccacagtttttcctagcaagggggaaaaaataactagaggggaaaaagggcctttcagtaatacaaagtaatacactcacattttatctaatatagaaagcctctcaagcccaataaccctatcccatgtctcactttgtttttccccatagcacttatcatgtatcatatttgtcatgtgttataaaagatgatatgttttacatgttgatttcttgtgtgtctcccttttagaatatcagcctcacgagggcaggtgtttttgttgttgttgttgttcactgttgctccattacagtgcccagcagtggtattcagtaaaatctgtggagtgaagaagcttcgacctaaatgtctgcagtgggggtgagtttggggtaatggtttccatgctcagtgataattgtttgggaaacaatgtaaagtgatggcttcggaagacagaggggcccaggatggctggccatggatgccaaggctgcttgtaaagagaagtccacgtgccatatccatggaatctctgaaccaccacgttcaagttctgtaacttgggcatgtgccctaacctctcagagcctcagttcctccatctgtaaaatagggataatagtggcatctaggctgggtgcagtgcttcatgcctgtaatcccagcactttgggaggccgagccgggtggatcacctgaggtcaggagttcaagaccagcctgaccaacatgaagaaaccccgtctctactaaaaatacagaattagctgggcgtggtggtgcacgcctgtaatcccagctactcgggcggctgaggcaggagaatcgcctgaacccaagaggcagagattgcggtcagccgagatcacgccattgcattccagcctgggcaacaagagtgagactctgtctcaaaaaaaaaaaaaaaaaatagtggcatctacacctcccagggttgtcataaacattgagaggctgtgaacagagagcacttggagtgatacctgcatacagcaggtgtttaatacatttttggctttcagatcccttgggtgatggctgcaggactgacccatagtcagggactcttcagttgaggggcaagcagctggcatctgtggcaaaaatgccctctctgcacaccttgatggggtggcccgagagggaaggagggatggagccataggcctgccctacggctactgagtggtgtgttgaagatccctgagattcctagagacaaggcaggttcaggaactccaggagcacctcaggcacaagaggggtacagggcagatgctgagtgggtatgtcaggttggggccctggggctcctaaggggagcctctgctggggtccccagagaaaagactcacctccccaaggctcagacagggaaggggcttgggcttaacttggcctaagggtttgtgagaacagcccagagggatgcacagaagagttgagatgggcagagctgtggtacaaaggccacttagggccccattggaactaaatcccaaaaggtcccaagggaggccttcaccaaccaggaggtgagggggtgacagattccagggtgcaggcagggttggaggggcccaggtatttccctgcatccaagtgcctttataaaagggacccatagaaagcatcacagcccggccagggtctgtatggaagacgcctgacttgtcaccaggagtgaggcagagtgtccgggagatgtgtcccccagagaccccccccaagaaaaatcccagggctgagaaagcacaagaaggccctaagccggcaccatgacatggggaacctgttgggatctggagcctggtgctccttcttgggggggctgacatgactaagtcgggtccacagcctctttcccacactcacccattccctggccacccctgcctagtgcagcacccatgtcacctggtggtccctgtgggcactgcgtcgtggccggtcccgaggggagaggccattgatcttgcattcgtagcaggcttcagacgagagcagctcctctttgtccggggtgtcctggggtccggggctgaagcccaggccggagacacagtgcctgggccaggatgggcagggtggaggggtttcagaggcgggctgatgggacctccccagccacgccgctccaccccatactccgttctgagtcatgctgcaaatgcccacgcacacaaatgcctctgagcatgtgctggtgtggctccgtgtgcacgagtgtgtgtgcaccacataagggtgtgcatgtgtgtcccttggttcatttgggcataggtgtgaacacaggagtgagaggacgtgcacaggctgggatggatgaatggacatgagcatacccaggggcatgtgcgtgtgccaacctgtgtgttcacatggggaataactcatgcaggcacatgtgtgctcgtaggaatgtgtgaatctccctgagtgtgcctggggatgtgtgtatagtgtgagcactcacagatggctgacgcgtgcttcctcacctgtgcaaaccaggatgtagcaatggcactgtgcccccagggatgtgggcatgcatgagcctgagtgcacactgggacatgcgcgcgtgcacacacacacacacacacacacgtgtgcatgctgggatctgtaaatgcacaagggtgcccacgcatgctggtacgggtgtgtgccatgtggacaactacatgtgagtgctgtgaggatgtgtgtgaatagatacaggtgccactgtacctctgcgtgtccaggactctgtgcatatgtgggcaaatgcctgcatgcacaggctgaaggagctcttctggtaaattcttggcatgcacaaagccccgtgtgtgtgtgtgtgtgtgtgtgtgtgtgtgtgtgtgcgtgcgtgcatggacgcttgcggggcatggagtctgcttgccccactccagcctctcacccttgcccagcccggaagtagccttgaggacagccgcacaggaagccaccaggcgtgttggcacagctgtagctacaggggccacgccgtccggcgcactcatccacctcctggcagcccccgagggcctgatcaaagtcaaagccagaggggcagacgcagcggaagccaccaagagtgttgcgacaggaggcgctcccgcaggtggggggcgacagggcacactcattctcatctgtgggaggaaaggaggaggagagggaggacgcagaggtggggcagtgcagccttcacacccccagagccctccacctggaatgctgtatgttcagagcccaagtccaatgccaaactcttcagcaagctggcagtgagccctgagactagatcggccccatagccccgctgccccaaaccctgtggttctccttcacaacatctctcaacacttcccctaaaccccaaaatgtgggatgatctagaacaagctttctcaccctcagtgctattgacacttggggccagatcattctctagggaggaggcctccttgcactgtgggacattgaacagcatccctggcttccacccgcttgacaccaggaaaacctatccgcctccaattgtctgtttggagttgggagtctcactctgttgcccaggctggagtgcagtggtgcaaccatagtgcactgcagccttgacgtcctgggctcaagggatcctcctgcctcagcctcctgagtagctgggactacaggtgtgcaccaacatgcctggctaatcttttaactttttgtagagatggggggtcttgctatgttgcctaggctggtcttgaactcctggcctcaaatgatccccctacctcaatatcccacaagagtgaactaccatggcggatcccaattgtgatgatcaaaaatgtctcgcagacacttcaaaatgtactatgggggtaaaatggtcctctgttgagaacctagttaggggtctaattaatctctgtttcctttgctggactgaaaaactcaaggcagaaatggtttttcagctcacttctgcatctgagctcagggcctagtgaaaggcaggtccttggcaaacagttggggaaagaatgaatgagtcagtacggggggaggaaacaagttgaggaagagttgccagcaaaggccaatggtctgtgggatccccaagatccccaggggacaagcagcttgcctggggggtggggtcgtgtggtgtgggaagcccaagaagaacttagctaaagacccaccatgacagacaaaaggagggggcagagaaggcagtgcctgtgaggcagtgggagagcagggatagccacatcacaaaggccacaggagagagtgtccaggagcctgaaggggcagactgtggtgcccagagcagtggaggtagaggatggaggccgaggagaggtctcaggagagagcaagtgggcctgaaaatggtagagggtgaaagctgcactgcagtggaggaatgaaaagagcagtgaaagaggctgctaggaggtcctagagcagccagaagatgggggaaggttggggggcagaaggctagccccccaaatggagggcctctgcaacagctatggcaatgacatagcatgcacacctccattgccccttgcagcatccatagcagacatcactaatcacactcgtggcagacatcactaatcaatcacagcactctttccctgtgatcacaaaattgcagacttcaggtctcagaatctttctcaactgagtcctccaggccaccatgccctaaggaatgaactcagacactttttgatgcttattctgctgcaccttgactccccagcagtggggaactcactaccttctgggctggcctgttcaatctttagataattgtgcttgtcacatcatcttgcagggtggcgtctgttagtcgcctgctctgagcagattctggtggagggcccagcttcttcccagcccttttcactcacccacacactgggcccactgggagtgctgggtgaaaccctgggggcagctgcagcggtagccccctagctggttctgacagccatgctggcagcggtggggcccatcacattcattcacatctgagacatagagagagggagagagggtttaccagacggctctcaggaccaacacccccaaacactagaccccagccaaagctgggctgtaccttcacagccatggcctgagctgaccagggtgaagccttggtggcattcacagcggaagctgcccggggtgttgtggcagtgcccgtgggcaccacatgggccaggctgggctgagcactcatcattgtctgcagaggagagagatcaggcagggttgcctgctggttaaggaactcgtgtcaggtgacacaatgccagtcccaccactgtgtggcttcaggcaagttgctcaccctctctgtgcctgtttcccactctgtgaaatgagatctgtaacagttcctgactcagaataggcaccaatgtttgagatcctgcacataaagaatctcatctccaccgcctcgaagctgtgtgtccttgggcaacttacctaccctctctgtgcctcgatgtcctcagctgtatatggagatgataatgtctacctcattgcatttttgtgtgcatgcgagaattaaattaacctaatcatgtaaaaggcttagggcagtgcccggtaaaagagtaaaagataaacaaagcctcttttccttctcccatggaaaaatgacatagggttgcctgttgagttttgttcccatggaaacctgacaatagtgtgaggtcagccggtgccatggattgaatgttcgtgtctctccaaaatcctatgttgaagccctaacccccagtgggctggtatttggatattaggtctttgggaggtgatcagggttagataaggtcatgagggtagggcttttatgatgagaatagtgcccttataagagacaccagaaagcttgctctgtctctgccaagtgaggacacagcaaaaaggtggctgtctgcaaaccaagaagagagccctcacagaaccagccgtgctgccaccttgatcttgaactgcccagcttccagaatggaaaaaaaaataaatctctgtagtttaagccaaccagtgtatgggttgtccgtgtgcgtgtgtgtgtgtgtgtgtgtgtgtgtgtgtgtaagctattgttttaaactgaatagtctgtgatcatctttctatgtctttaaatattcttactattcttgggggctgggtacagtggctcatgcctgtaatcccagtgctttgggaggcctagggagcctccggatcacctgaagtcaggagttcgagatcagcctgaccaacatggtgaagccccatctctactaaaaatacaaaacaatttagccaggtgtggtggtacacgcctgtagtcccagctactcgggaggctgaggcagaagaatcgcttgaacccgggaggcggaggttgcgatgagccaagattgttccactgcactccagtctgggtgactgacagagtgagattccatcttaaaaatatatgtatacatacacatatatatatatttttcttactattcttatttgcataattttaaatggccaccacatcttcacttggtgtggatttgctctgcttcatttaaccaactgttaattttggtttttttagataggatctcattctgtcccctgggctggagtgaagtggcacagtctcagctcactgcaacctccgcctcctgggctcaggtgagcctcctacctcagcctcctgggtagctgggactacaggtgcacaagaccatgcctggctaatttttgtatttttagtggggactacgttgtccactatgttgcccaggctggtcgcaaactcctgggcacaagagatcctcccaactcagcctcccaaagtgctgggattacaggtgcaaaccactgcgcccggcccagtttttggatttgaatttgctaaatcccacacttgcagtctatggtattttgttatggcagcctgagctggctaaaatggccaggttgctacgatggtaggagggcattggtacaatggccagagagcattgctacaatggtgggagcccatggctggtatactgcatttgaactgggattttgaggaatgaacaacaaattcctggtggaaaatcctgcttttagcttccttgagtacagagattcttgacactaagcacatatctatggagatgtagagtctctcttggggtcgggcacagtggcttatgcctgtaatcccagcactttgggaggccgaggcgggcagatcacctgagcatgggagtttgagaccagcctgaccagcatagtgaaaccccatctctactaaaaatacaaaaattagctggatgtggtgctgcatgcctgtaatcccagctacttgggaggctgaggtgggagaatcgtttgaacccaggaggcagaggatgcagtgagccacgatcacgcccctgcgctccagcctgggcgacagagtgagactctgtctcaaaaaacaaaaacgagcaaacaaaaagtgaatatctcttgggaacaacagacatgggaacatgaagcttctaagtaggagtggcccctgcggctgcctgagctgtcacttgaggggccacagagaatagctctagactctggccagaagaaatgtctggcacagccaggcaccgtggcctgcaatcccagcactttggaaggccgagatgggcagattgcttgagcccaggagtttaagaccagcccgggcaacatggcaaaaccccgtctctacaaaaaatacaaaaattagccgggcgtggtggcacacacctgtagtcctagctacttgggaagctgaggcaggaggatcgcttgaacctgggaggtgagattgcagtgagctgagattgcaccactgcaatctccagcctgggcgacagagcaagactccatctcaaaaattaaaaacagaaatgtctgccaccacccacaatttctttcccttacatctagcaaagcaaaccaagtgtcaggctggcctactgtggccatgtgagtttgctcttctattaacagtttagtcattagcagacaggaacaccctgagacaaaatccaagccactgtctgttgtatcaataaagtttattgggacacagacacggtctttcatttacgtatctctccagctgctttgatgctagcatggtagagtccaatcgtggcgacagagaccatctcaactacaaagctgaaaatatttactcctcttgagccctttgcagaaaaagtttgtgacttttgatcaagttgagcctcacaccaccatctgcctggctgagaatttaaactcatttctagtgagagaagcagtcacgtgtgaccttgctccacggatgttacccatgtgatgcacggccctggtccatgcagctgctcacacatccagtgaaaaccttactttttttttttttaatagagatggggtctcactgtgttgcccaggctggtctcaaactcctgagctgaagcaatcctcctgcctcagcctcccaaaatgctgggattacaggtgtgagccattatgcctggccacagactttaatgttgcagagaaacagaaatgcctcttgtttcaagagtctttgttcaaatgttctctctctctctcttttttttttttttgagtcttgctctgtcccctaggctggactgcagtggtatgaacactgctcactgcagcctcaacctcctgggttcaagagatcctcccacctcagcctcctaagtagctaagactacaggcaggtgtcaccacctctagctaattttgtattttttgtagagatggagtcttgccatgttgcctgggctggtctcgaactcctggccctaagccatcctcccaaagtgctgggattacaggcatgagccacagtgcccagccaaatgttctcttttggtgatacttgacctgatccctctcttaaaactgaagccctctcaggaggctgaggtgggaggatcacttgacaccaggagtttgaggcttcagtgtgctgtgatcacatttgtgaatagccactgtactccagcccgggcaacagagtcattaagagactccatctctaagaaacaaaaaacaaaacaaaaaacccagatgtggtgagcctgtagtcccaagtactagggaagctgaagtgggagaattgcttgagcccaggaatttgaagtttcagtgagctgcgatcacattgctgtattccagcctgggtgatggagcaagactccatctctaaaacaaacaaacaaacaaacagacagacaacataaccaaaaacaaccaccaccaaacctctccctaccctccaaaacaaccctgtggccctctccttctttcctgaactcctgcttttactttttctttctttcatgacacacatcacctttgaacacactattctgttaattgtttgtttgtttgtttgtttgttttcgagacagagtcttgctgtgtctgagtgcactggcacgatctcggctcactgcaatctccacctcccaggttcaagtgattctcttgcctcagcctcccaagtagttgggattacaggcgccaccaccacacccggctaatttttgtatttttagtagaaacggggttttgtcatgttggccaggctggtctcgaattcctggcctcaagtgatctgccagcctcagcctcccaaagtgatgggattacaggcatgagctaccacacccaaccacaccattctgttaatttcttgttatgtctgcctctagtcttgattctgtgctagaaggaaagttccatgatggaagatccctgccttttatgtttgttgctgtacccccagggtctataacagggcccgacaaaccatttctgtttctgtaacaggctctgtcccaagactcttctctgccaatatagtgcaaaagcagccacaggtgattgtaagcaagcgggcttggctgtgtgtcaatcaaactttattaacaaaagcaagcagggggccgggcttggctggcagcctggagtttgccaccctttggtctagagcactgcctggtacacagtaggtgctgtctgggcagattagtgggcgcgtgaaaggggccacccttgactaggctctgcctttggggaagattgtgttccctgggggccacgagacactaagaaacaatgatggtagcagatgcccttgtggctttagctgttgaactgatttcctcctgggactatgtgagacctgggatttcaggagcgctctggggaggctctgggagggagatccagcagggacttgtcagggggaaggcaagatgccataagccaaggcgagagggcctctctcctcccaaaggagaggaaggaggttctagatgcctccaggaagcgagcactaaggaagtaacgactttgttctgatcacccccatgtccccaatgtccaatacacaccgggtgcttgatactattttttttgagacagagtttcgctcttgttgcccaggctggagtgcagtggcatgatctcagctcactgcaacctctgcctcccgagttcaagcgattctcctgcctcagcttctcggagttgctgggattacaggcacctgccaccatgccaggctaatttttttgtatttttagtagagacgggttttcaccatgttggccaggctggtcttgaactcctgacctcagatgatccacccgcttcagctttccaaagtgctgggattacaggcgtgagccattgcgcctggccaacttgatatttttttggtgagcaaaataactaatgctggggtcatgggtcacctcccggtgaggggcaagggtcactcaccgaagcaggcctggtggtgctgggtgaagccgggcggacagcggcaggtgaaggcgcccacagtgttgacacagaggaactgacagttgtgctgccgggaggtgcattcgtccaggtctgcagcacggatggtccagcaggctcagggcagggcccagtgggggattaggggcttcccaggggctgcccttgccacctccaggcagaggggtgacaagagaaagacctcggagatggtgcttgactccatgcagatgggagggggtgagattgcaggggacatgtcttgggcatccctttggggccctagactgcatgcagtggtgggagtgggggagagttgaaaggacatcacctttgcaggtcctgccatcctcctccagcaggtagcctcggggacagctgcacaggaaactgcccttcgtgtttttgcagaggaaggtacatggcttggggacctggctgcactcatccatatctggggaaggacagcgtgggtagtggggcggggttagacagacattccctgggggtgttcagggactgaggtctccaccagaccccgaccatctgaaatctgtggacttacacaggaatgaacacttctttctgcaaaaagccaggtgggaaatacatttggttttgcaggccacaccatctcagatacaactactccatgtggcctttgtactagcaaagcagccattgagggtaagcagacaaatgtgcatggctgtgtgctaataaaactttattgacaagaacaaatggagggccagacttgaccctcgggctagagttttcttcccgctgacttagatgtacgcttgctacaaaacacaactgaaaaatatcaggatgtgcaaaataaaaggaagaaataacagcaggaaagtggcccaaacagggtgggggtgggagaacgaaaggatcctccctccctccctccctcccttccttgtttctctctttctttcttgagacggagtctcgtttcatcacccaggctggaatgcgatggcgcaatctcagctcactgcaccctccgcctcccaggttcaaacaattctcctgcctcagcctcccaagcagctgggattacaggcacataacacctggctaattttttttctttttttcttttttttagtagagacggtttcatgatgttggccaggctggtctcaaactcctggcctcaagtgatccttctgcctcagcctcccaaagtgtgctgggattacaggcgtgagccacctcacttggccttccttcccttccttcctctccctttctctctttctccctttctctttctttctttctgtttctttctctttctttttgtctctctctctttcttttttctttctttctcttctttcttctcttttttctctttctcccctttctctttgtttctttctctctctctctcttccttccttcccttcccttccttccttccttccttccttccttccttccctttctttctctctttctttcttgacagagtctcactctgttgtccagactaaactgcagtggcatgatctcagctcactacaacctccacttcctgggttcaaacgattctcctgcctcagcctcccgcgtagctgggattataggcatgcaccagcacgtgcagctaattttcgtatttttagcagagatggggtttcaccatcttggccaggctggtcttgaaatcctggcttcaaatgatgtgcccaccttggcctcccaaagtgctgggattacaagcatgagctactatgcctggcctgtttttttttttctttctttcttttcttttgtttttcattttttaagagacagggtctcactctgtcacccaggctggactgcagtggcacaatcagctcactgcagcctcagactcctgagctcaagcagcctcccaagtagctggggctacaggcgcatgtgggactacaggccaccatcctggctaattttttttagcgatggggtcttgctatgttgctatggaactcctggtctcaagtgatcctcccacctcgacctcccaaaatactgggattacagtagcgagccatcacacctggccctcagttgtctgtatggtttgggcaccactttgtaaatgaaagcctaacattgcaaagtggaaagtctcagggaagttgagttcaggggctgcacagaaggtggccaggctgggccaagggtgcaggtgcagagggctgggctcacccaggcaggtagtagcagtagcatccggtgtgtacccggcctgacagtggcagcggaaggagccaaggctgttgatgcactccccatgagcacacaggtgagcaagcatacggcattcatctacatctgggaaaaagtagggtgcaaatggggctggctggctgcttcgcgcctccaccgaggaatgtctccttctctctgcccagcagccgtctcctcggaggaaagtccagcctcccttccacaccggccactgcaccccagcccacgtggaccccatcctcaggctgcggatgacacctgagcccgcaggacacgcccatgaagcttccagggaaggggactcacacccacccctccccagcctcaacagcgacacctcctcagtgcaccaacatgcagaacagagacacacagtgcatgcaacatgatacactagccacacacctagatgctcctgcagaaacacgggaacacacgccaacactcagggactcccgagtctccccccagccacacccccaaaaagccatttcctccccagtcctactattttttctttttttttttttttgagacagagtctcgctctgtcgcccaggctggagtgcagtgacacgatctctgctcactgcaagctccgcctcccgggttcacgccattctcctgcctcagcctcccaagtagctgggactacaggcacctgccaccacgcccggctaattttttgtatttttaatagagacagggtttcaccgtgtcagccaggatggtctcaatctcctgacctcgtgatctgcccgcctcagcctcccaaagtgctgggattacaggcgtgagccaccgcggccctccccagtcctgttgatgccactgctggtcacatggataacccatctcactatcagtgacacactcagtgagacgcactgatgtccttatgctcgctcacacgcagacactcacatacctgcccttgtacactcacccaagtccacaacacacaggccgctggctccctctcactgccttctacttcacagatgaacatggtgtatacttctcacccagctgacacacacagacacacaccagctcccacgcagtccggaacgagctctcactcacaaagaacacacactgggccgggcgcggtggctcatgcctgtaatcccagcattttgggaggctgaggtgggcggatcacttgaggccaggagttcgagaccagcctggccagcatggcaaaacctcatctttactggccatgggagagccagcctctcccacggccccaaagagatcctttgggtctgttaaggccctcttgctttttatttttatttatttatttttttgggacagagtttctctctgttgcccaggctggagtgcaatggcgtgatctcgtctcactgcaagctctgcctcccggattcaagggattctcctgcctcagcctcccgagtaactgggattacagacacacgccaccaaatccagctaattttttgtatttttagtagagatgaggtttcaccatgttgaccagggtggtctcaaactcctgacctcaggtgatccggccgcctcagcctcccaaagtgctgggattacaagtgtgagccactgtgcccggcctatttttattgcttttggagacgaggtcttgctctatcacccaggctggagtgcagtggcactatcttagctcattgcagcctcaaattcctgggcttaagcaatcctccttcttcagcctcccaaagtgctgggatgacaggtatgctactgggaggcagaggttgcagtgagctgagattgcaccactgcactccagcctgggtgtcaaagtgagactctgtctcagaacacatacacacacattggctcacacaactgctccctcaaccccccgagttcttccatgcatatggtgcacacgtactggttctcatatctgctagcacaaagacacacacacacacacacacacacacacacacacacagtgtggctcacacattccagcacctgctgcagtacagacacatgaccctgagcaaactcccccgtttcttgcctccctgggggtcctgagggcatgggcacccacctcggccctcagcagtgtagcctgagccatgggggcacagcttcctgtaggcagaggtgccgggcaggggacagagctcgcagcggggcccccagccccggccacccccacagcagcactcggccctggtgacagcctcactgctgctggacagagaccggcacatggtctgcagcacctcggcaaagcagggcccctgccggatgtctgcagagaacaatgggaaagacaacggtcactccaggaggctggtttgggggcaaagactgagcttgctttggggcaagctgtattttgggggtgttggggacaggggtgtccaggagggagttggatacacaggacagatggccctagtgggtcaccggctggggttagctccccagaagtgggagatctggggaaggttggttccggggtgtggcgccagtaagttggaggaggcatggagggagcgtcccgctcttccagtatttaacagaagggacagagggaagaggggcagcaggggagcactggacatgtgtgtccggattagctcagcaaccccctgggttgcccgtcagtgccgcaggccccgtccctgccttggagggctcccagacagtgggagggacaggcagtgggagggacaggcagtggggggacaggcagtgggagggacaggcagtgggagggacaggcagtggggggaacaggcagtggagggaacaggcagtgggagggacagggagtgaagggggcaggcagtggggggaacaggcagtggggggggacaggcagtgggtgccacatggtaggtggttgcaaccactgtgcgtgtccagccacactcaccgtggcactcggtaagggtggggctgggctggaatccctcatcacagtcgcaccggaagctgcccgcggtgttgacacagcggccgttgacacagaggtcaggctgagcgtggcattcattgtcatctgagatgggaggggtgaggcaggtgggcggggaggccacaggcagccagcctctcccacagccccaaagggcccctttggatctgcccaggccctcttgcttatttttattttatttatttttattattattattattattattttttgagacagagtctcgctccgtttcccaggctggagtgcaattgcctgatcttgggtcactacaacgtccacctcccgggttcaagaaattcttctgcctcagcttcccaagtagctgggattacaggtgcccgccgccacgcccagctatttttttttttttttttgtatttttagtagagacggggtttcgccgtgttgtccaccctgttctcaaactcctaacctcagatgatccaaccgccttggtctcccaaagtgctaggattacaggcgtgaggcaccgtgcccagccttattttcatttttattgtttttggagatggggtctcactctgtcgtccaggctggagtgcagcggcactgtcctcccactgcctgtcacctccactacctgtccctcccactgcctgtccccccccactgcctgtccctcccattcattgaagcctcaaattcctgggctcaagcgatcctctcgcctcagcctcccaaagtgctgggatgacaggtatgagtcaccgtgcccggtccaaccctcttgctttgacctctcccttccacaaggagtttcctgcacccatgaagctccagtgccccatacctgtgcagccctccccagagccaggcaggggccgcatgcctgggggacagacgcacgcgaaggtaccgatgaggttcttgcactccatgccccgggcgtggcagtcctgctgaccatctgcacactcgtccacatcttcggatgaccagagacagatggtcagtcaaggccaggcaccctatggctgtggggacctggattccaccctgcgtcagccctgtgggacctgagtgagttccctgcagaccctgtcaaatgtctatccctcttaggaagggagcccccagctcctgcccagccccagcctccaagaagctgagggaatcaggaattgtcccccaaagcttgcatcccctgcccatgtcagggtctgtgagtctgctcatggcccctggaacactgaccctgaaacagccccagagacactgagtcccagaccagggtctcccacgcttgacactatgaacatttgggataggaaagttctttgcggtgggcggctgttctgtgtgcattgcaggatttttttttttttttttttttttttgaggcggagttttgctcttgtcgcccaggctggagtgcagtggcatgatctcggctcactgcaacctccgcctcccaggttcaagcgattctcctgtctctcagcctcccaagtagctgggattacaggcgtgtgccaccatgcccagctaattttgtatttttagtagagacagggttttaccatattagtcaggcctacctcgacacatggccccatcctcccgcagggtgtagccggctggacaggtgcacaggtaggagccctcggtattgtggcagcggaaggcacagagcagcgggttcagggagcattcgtcgatgtctggggaggccagtggaggtgccagctgggtagggactgagggcgggacctccactccctcccccaggcatctccgtcacacggcccaggtcctgggcaagcagagttgtaccctcgcaggtcatcatgaggccaggctcaaagccgtcagcacaggcacattcgaagcctccgatgacattggtgcatgtcccttgcccacaggggtggccgacagagcactcgtctgtgtctgggtgggagtaagggggtggtcagcacctgcagagggtcccccatcctcagtagcatcccatctgcctgcctgttgaccaccacagatcggagggggccagatcgaatgcacctctagtctggctatggggcaggcaagcggtatgtgtttagtgaatgaatgagtgaatgtgtgagcaagtgggcaggtaaaggaatgcatgagtgagcaagggagtgagtgaatgagcaagaagtgaatgaatgagccagtgaatgaaggagtgattaaaccagtaactgaaactgaggcaggagggtcatttgagcccaggagttccaaaagagcctgggtaacatagcaagacttcatctctaaaaaacatataaatgagtaagtgaatgaatggttaaatgaataagggaatgagtgagtaaaggggtgaatgagtgggtgaattactgagtgagtgaatggagaaatcagcaaggaagtgaatgaatgaacaagagggcaaatgaggaaacgaatgagtgactgaataagtgagtgaaagcatgaatgaatgagcaaaggaatgagtgagtaaatgaataaatgagtgattgaatgggtgaatgagcaaggagacaaatgaaggaacaaatgaatgagtgaacaaacaagcaagtgaatgaatgagggagcaaacgagtgaatgagtgaatgagtaaatgaatgagtgagtgaatgaatgagccagtgaataaatgaggtgtgaatgaatgagggagtgattgaatgaacaagtgaatgaatgaacaagcgaaggaatgagtgagcaaaggagtgaatgagtgagagaattagcaagtgaatgagtgagggggcaaatgagtgaatgagtgaataagtgagtaaatgaataagtgagtaaatgaataagtgagtgaatgagcaagtgaatgaatgacgtgtgaatgaatgagggagttagtgaattaataagtgaatgaatgaacaagtgaaggaatgagtgagccaaggagtgaatgagtgagtgaattggtaagtgaatgaataagggagtaaatgagtgagtgaatgagtgaatgaatgagaaaatgagtaagtgagtgagcaagtgaatgaatgagtcagtaaatgaataagtgaatgagtaaatgaataagtgagtgagtgaatgaatgagcaagaaaatgagtgagcaagtgaattaatgagtgaatgaagcacagagggagaaaaagtgaatgggggagagaggcagtggttaaggacaggatctcacccactgcctgggggtgtcttccctgccctgctctgctccttcctgtcctgggaggggcctgggacagagctggggaagggctggccactcacccacacagttgatgccagtgaagtccaggctgtagccaaagggacactcacagcggaaggatccatcggtgttgacacagacgccgttagtgcagacgccagggttctctgcacactcattcacgtctgcggatggcaggcgttgcagacatggcttctgtcaccacacaatcgccagagccctggccacactcaaggccccaaggggacaaaagcccaagccccaggctggcagggtccagggccacccaggctctcagggggagcctgaaactcagagacccaggcagtgcggagatggatctgggtggcccagaaggggctcttagcatgtgggtgaggggctcaccttctcgggagtcatccgggcctgggactgccccgtggccaaaggggcagagctcctgaaaggcagctggacggagagggggaggggagtcagagtcagggcctaggtgcagcccccaggtgtgtgcagggaaggatgagagaagaatgagagaggaaggtgagggcacatcatccagggagcctggacaggggtgggcactcaccgctgccctcctggggacacagttcgcaggggtctccccagccctccccaggcctcttactgcagcagcagcgggtcttggtggtgttgaaagctttgggcaccgagcacttcccagcctcaaaacgggtgaagcagaaactctgccgtgtgtctgtggggtgggggctccattaccctgattgaaagccgctggcagtgcccacctgcccctgtgacctcccgcaccccagtcctggtgaatgggttgtgctgatcctgccagtggccaatcagaacatgccatgcccctggtcatggtgattggtttgagtatggacatgtgacctactctgggccaatgaggatctgccctgggtttttagttgttgttgttggtggtggtggtggttttttttttttttcagatggagtcttcctctgttgaccaggctggagtgcagtggcacgatctcagctcactgcaacctctacctcccaggttcgagtgattctcctgcctcagcctcccaagtagctgggattacaggcatgtgccaccacacccggctaatttttgtatttttagtagagacggggtttcaccacattggctaggctggtctcaaactcctgacctcaggtgatcagcctgcctcagcctcccaaagtgctggtattacagtcatgagccaccgcccctggcctgccctggggttttgaggggacagctggaatcccaccccacttcattgctttggggtgttctcatgccaggaagaaagatcaaacttggtggttactcttggatcaaaaaccccttcctggagaggcaaaacgactgattccagaaagcccgaggatccaaacccccaatccttggctctggacacctatcaagtcctcaccagcaggctggggtcccagcctcccagaacagcaaatattcgctgaggtgaactgcatgctctgctctcacccttattgcccctgacctgtgagagaacaggctggctcaagctgggtgaggttagcccacagtagacaaggctagcccagctgaaacggagccagcccagagtagtctaggctagctcaaactggacaaaaccagcccattgacagcctacagtcatgtgaccaatacaaggaaaacctaaataagcacacacctagctcagaatggaccaggttagccctccatagacatgacctctatagccaagaggttgctggcactaggataactctgctaatgcaaacagacacctctgcctggtcagagctcccaaagggtcacacaagaaaccacagccctcttttctgggcaatctgacccttccccgccccacttcccaccctcttccctaagccctgtgtggacttaccaaagcaacggtgcccattgtcagagaggacaaagccaggtgggcagaggcactggaagctcccagggctgttggtacaggtgccaaagaggcagaggttgggctcctctgagcactcgtcgatatctggaagggcagggacatgagctgggtggggggcaagtaggacctccatcagtggggagaggactcagctgtgagaagggacagatggagtgcaggtccagccaggggctgcagtggggctggggtcctgagagctcagtatgagcttcagcacgaggtgggcattgtgtgtgcacgtaggtccttcccggaaggcatctccagagtaaaggtcatggtcaggaatagttcatgattggagactgaaactgcacatagtacaacctctatggaaaacagtgtggcgattccttaaagaactaaaagtaaggccgggcgcggtggctcatgcctgtaatcccagcactttgggaggtggaggcgggtggatcaccaggtcaggagattgagactatcctggctaacatggtgaaaccatctactaacaatacaaaaaaattagccgggtgtggtggtgggcgcctgtagtcccagctattctggaggctgaggtaggagaatggcatgaacccgggaggcagagcttgcagtgagctgagctcataccactgcacttgagcctgggtgacagagcgagactctgtctcaaaaaaaaaaaaccaaaaaactaaaagtagaactaccattcaatccagcaatcctactactgggtatctacccaaaggaaagtaagtcattatatgaaaaagacacacgcacatgcatgtttatagcaacacaattcacaatcgcaaaaatctggagccatcatatttataaatgcccatcagccaacgagtagataaagaaaatgtggtatataatacaccatggaatactactcagccacaaaatggaacgaaataggcacagtggctcacacctgtaatcccagcactttgggaggccaaggctggtggatcacttgagatcaggagctggagaccagcttggccaacatggtgaaaccctgtctctactgaaaatacagaaattagctgggcattgtggcggggcgcacctgtaatcccagctaccaggagggtgaggcaggagaatcgcttgaacccgggaggtggatattgcagtgagctgagactgtgccactccagtctgggtgacagagtgagactccaccaaaaaaaaaaaaaaaaaaaaaaaaaaggaacaaaataatgtcctttgcagcaacttggatggggctggaggccgttattctaagtgaagtaactcaggaatggaaaaccaaatatcgtatgttctcacttataagtgggagctaatctatgaggatgcaaaggcataataatgatataaaggactttggggacccccagggaaggatgggaggggggtgagggataaaagactacatactgggtacagtgtatactacttaggtgacaggtgcaccaaaatctcagaaatcaccactgaagaacttatccatgtaaccaaaaaccacctgttcccccataactattgaaattaaaataagaaaaaatagaaaaaaaaaatttaaaccttaaaaaaagaaaattgcacaaagctaactgagactggatatatttaccctacaccggacagggttaactcatgttgtactaagctagcccaaatagaatagatcagaataggccgggcatggtgactcatgcctgcaatcccagcactttggtaggctgaggtgggaggatcgcttgaggtcaggagtttgacaccagcctggccatcatggtgaaaccccgtttctactaaaaatacaaaaattgggcctggcgcaatggctcatgcctgtaatcccagcactttgggaggccaaggcgggcagatcacgaggtcaggagatcgagagcatcctggctaacatggtgaaaccccgtctctactaaaaatacaaaaaaatagccgggcatggtggcgggcgcctgtagtcccagctatttgggaggttgaggcaggagaatggcgtgaacctgggaggcggagcttgcagtgagccgagattgtgccactgcactccagcctgggggatagagtgagactccgtctcaaaaaaaataaacaattagccaggcatggtgatgagtgactgtaatcccagctactcaggaggctgaggcaggagaatctcttgaacccgggaggtggcggttgcagtgagctgagagtgagactcctctcaaaacaaaacaaacaaaaaacaaacaaacaaacaaaacaaaacaacaacaaaaaaaggatagatcagaagagcccaggccagactggtccacgttagctcaggttatacaaggctagcccagatggaagcctggatcagaggtattcaggccagactggttcaggttagcccaggctagcccatctgctcaagccagactggtccaggttagaccacagtgaacaaagcagcccatctgctcagcccaggctggtccaggttagcccacactctctgaggctagtccaagtggataaatggaccaaaggagattaggccagacttgttagtccagactgcatgaaatcatctctatgggtgattacaccggtgaagcttaggccagactggtccttgatctccagttagcaagtgaggagctctacatttgggtgcactgagaaacggtgagaccccacacccatgtcaatttataggattcatgaggaagcctgtgggcactagagacaaagtcctgagtgcagagtccagaaacaatcagaatgacaataatagtttatgaagctgtgtttgacgctgcgttaagtacatctccaccttcatcacaaccctagctggtattcccattttatggatggagaaagagaggcactccctggcgccagaaacgggagtggggctggacactcaccaatgcagtggtcactctgcacctggaagccagggggacagatgcagcggaaggagccctcgaggttctggcaagtgccgggtaggcaggttcctgcaaggctgaggcactcattggtgtctgtgaaaaggaggaagaaaggtccttgtgccagccaggatgcagggggctcacttgggactgggaccaacacctgcaatcactgtgtgatcactgagggccccaggacaagccctcccagtggcaattctggctccagggcaagggctgagactcaggacgacagggacagctggggaaggattatctgactctcgtggggttataggtggggcagatggtgtccagtggaaagaggtagcaagattcctaatctggcaccaccagcagattccttccatggtatctatttagcgcttctactattctttgcttctggaaagttacattttcaagacagcctcaccctacacaacaaaccccatacatagaaacataggtttgatgtgctgattttataattattttatttatttatttattttgagataggatctttccctgttgcccaggctggatgcggtggtgtgatcatagctcactgcatcctcaaactcctgggctcaagtgattctcctgccccagcctcctgagtagctaggactacaggcaatagccaccactcctggctaatttaaatttctttgtagagacgaggactcactatgttgcccaggctagtctcaaactcctggcctcaagcaatccttctgcctcagcctcccaaagtgctgggtatttttttttttaaatcttaaaataaatgcttgggtagtaaatggatctatgctcacccagaagtaccaaactgtggtgtacatggagcaggggctggctgagatgcctccgagcaccataggcagactcacccacacagttcttcccatcagctgtgagctcaaagccatcctggcagaggcagtggaaggaaccagctgtgttgaggcaatggccaaatcggcacacctgccccaccagggtagtacactcatcaaaatctgtagaggggagatgggcaggccagttcacccacaaaacttgaagggatcaaaccttccttgtacttctgtccacaactgagttgagctgacagcattggcttcaacttgagcactcatgtatagactatgtatattagccttctacctatcttatgaggtagttgctgatattttctaatataaccatgtaatgctatgaatttgcctctaagtgcccccttagctgcatcctatgtattttcatatgttatgctttcattttcattttcttttacttcaaaatattttctaattttccttatgatttatttgacctatggattatttaggagtatgttatttaatttctaaataatcggggactttctgggcatctttctgtggccaatttctagattcacttccttagattctgagaacccactttgtggccagcctgccacctgagccgactcacccacacaatccccattgtgtgtcaccacaaagccagggaagcagaggcagttgtaggagccaatgatgttcttgcaggtcccatttccacaaggctgccggtcacactcgtcaatgtctgcagaagcaaagccgagagcccaacccagctcacccagggcattggggaacttggggagtgagaggccagctggacctagcactcctcccctgcacctagccctgcctagatgactgggcagtgacccctggcggtgatggctgggaagtactcctggtatgatatatcacccccattttacagatgggaaaactgaggcacagggaggcagatcaaccatttacccaagatcttaatctcaggacccaaacttggatctctttgtgaactaggatggacagaaacaccacttccatcccaggggaggtttagaccccaggcagcctggcttgaaaaggagggggaagataagggtctcacccatgcacagggtctggtctgcagaggcctggaatccacggtgacacagacacatgtagctgccttctgtgtccatgcagtcaccatggctacagacattcgggatctcccgacactcattccgtcctgggggtgcagagagcatggtgttcccagggctcctaccacagtgtttgcctgagctctccctactgcaatggggaagccagaatctgccttgaagttccccactcaaacttccaccaggggcgtcaggctgtctgcatggacctgagctctcacctctatcacatcctattaacagacactctcaatacatcccccacccccctaatagtatagaaaaggagaaagacctggacagagccataccccatctaagtccccatgggtgacagagcccagctccctcacctcctcccagggaccctgctcacccacacaagccccgcctggcgacagtttgtaccctcgggtgcacttgcagcggtagctaccggggatgttgatgcagtcagcattctgctggcagggactctccctgctgccacactcatcgacatctgggaaaatacagcaaatgaggtgggggtgacagagaagcccatcctgacagaatcaaacgtgaaacccagtccactgcttcggagcaggtggtttctctggaagcagccagagctggagtaagggtggttatatgagatggaggcccttggaaaggtgttagcccattatacatacagggaaatggaggcttacagagttttagttactcgcccagattgcacagtggcggacatgcatcccacccaggccccagggctgggaacagggagaggtggcaccttcacaagccagcaggatgctgttgtagttgaagcctgcggggcactcgcagcggaaactcccgatctggtttatgcagatgccattggcacagatggcggggatctccccacactcatcaatgtctgcagaaggcatctgccatcaggggcagcccagccccctgggacttccagcgatgctgagcgaagggacccactagccctgcaatctggttgaggctgttgtggccacaaaccagcacacactcaagaaaatcttgctgtgaccaaaatacatccgctcacaccagaaagaggtgaggagtgggaggaaagacaagagcagagagactgtgtgtgtttttctcaattaaaaatacacacttcctgtgacccagcaaccctgctggaaagaaatggccttaagcgtaagcaggacagcggtatgagatgctatttagcaagaaactggaaacatcaactgatgaatgcagagcaaaatatgggatgtctgtaccatggaatattcttcagccttattaaggagtaaagccctgtaacatgtgacaatgtggttgaaacctaaaatcattctgctaagagaagccagacatgaaagaacaatattgcatgactccatttaaaggaaatgtccagaagtagcaaatcaatagagacagaaagtcgatttgtggttgccaggggcagaagggaggggctaaagggagagactgctaataggcacagggtttacttttgtgtgatgaaaatgttttaaacttagattgaggcgatggttgtgtaacactgtgaatgtactcaaaaccactaaagagggcactttaaatgggtgaagtgtgtggtatgtgaattatatctcaataaagctgttatatataaacaatctaaatgtccatcagtaggggactggaaacaacctaagtgtccatcaaaaggggacttgaaagaacctaagtgtccatcaatgggggactgaaaacaatataagtgtccatcagtaggggactggaaacaaactaagtgtcaatcaatgggggacaggaaacaacctaagtgtcaatcaatgggggactggaaataacctaagtgcccatcaataggggacgggaaacaacctaaacaggcatcagtgggggactggaaacaaactaagtgtccatcagtgggggactggaaacaaactaagtgtccatcagtgggggactggaaacaaactaagtgtccatcagtgggggactgggaacaaactaagtgtccatcagtgggggactggaaacaacctaaatatccatcagtgggggactggaaacatactaagtgtccatcaatgggggactgtgatgaaaatgttctttttgtgtgatgaaaatgagttctaaacttatactgaggtgatggttgcataactctgtgaatgtattcaaaaccactaaacagggcactttaaatgggtgaagtgtgtggtatgtgaattatctctcaataaaactgttataaacaatataagtgtccatccaaaggggactggaaacaatccacctatctatcaataggggactggaaacaatccaagtgtccatcaaaaggagatctgaaacaacctaagtgtccatcagtgggggactggaaattacctaagttcccatcactgggggacctgggatgtatctgcaccatgaaacacttttaggcagggcaaagagagaggctgcacagcagatagtaacctggccggttcttcaagacacaatttggacgaaaaaagcaagttgtaaccaacatgtcaagcattacatcatttacgtaaaatgccccagaaaccaatgtcatatattttcagtgggggacctattatgtaatgaaggaagaaaaaactagaaagaaatattccagccataaagcataagaacgtccagagagggagaaaagagacagagttgaggtgatgactggaggagaagtgggttttatttgtcatggtttgattttttttttttttttttttttgcaacggagtcttgctctgtcgcccaggctagagtacagtggcacgatctcggctcactgcaagctccatctcctgggttcacgccattctcctgcctcagcctcccgagtagctgggactacaggcgcccgccaccacgcccggctaattttttgtatttttagtagagacggggtttcaccttgttagccaggatggtctcgatctcctgacctcgtgatccgcctgcctcggcctcccaaagtgctgggattacaggtgtgagccaccacgcccggccgccatggtttgatttttttaaaaaataaggagaatatattcagaggattaaaacaaatgaaaatgaattcatcagttaaacactgcatagttgacatttgggatgcaggtgttaaattatgcaatacgttgttaaaaagggagtattctggccaggctcagtggctcacacctgtaatcccagcactttgggaggctgaggtgggtggatcacctgagatcaggagttcgagaccagcctgaccaacatggtgaaaccctgcctctattaaaatacaaaaattagccaggcatggtggcaggtgcctataatctcagctactcgggaggctgaggcaggagaatcgcttgaacccaggaggcagaggttgcagtaagttgagatagtgccattgcactccagcctgggcaacaagagagaaactccatctcaaaaaaaaaaaaaaagggcatggagcaatttgacacaaactgcaacacggatgcaccttgaggacatcatgttcagtgaaataagcctgacacaaaacaacaaatcctacgtggttccactcacaggaggtccctagaaccgtcagattcacagagtcagaaagtagaatggtgggttccagggactgagggggatggggagtgagagtttcatggggacagagtttcagtgggaggagatgagaaagttccggatggtgatagttgcaaaacagtgaaagtgtacttaatgccactgaactgcacactaaaaatggttcaaatgatactttctcggagacaaaaaaaaaaaagtcttactctatccctcaggctggagtgcaatggcgagatatcggctcactgcaacctttgcctcctgggttcaagcaattctcatgcctcagcctcccgagtagctgggattacaggcatgcaccaccatgcccagctaatttttgtatttttagtagagacacggtttcaccatgttggctaggctggtctcaaactcctgacctcaggtgatccacccacctcggcctcccaaagtgctgggatgacaggcatgagccactgtgcatggctcgaatggtaaattttatgttgcatatattttactatcattttaaaaaatggataatggtttaataaaaatagtgtcattctttttttaaaaagaagtgttattgagggcaggattcctggggagttggaggtgtgtggagcgaggaggaggggaggatggaggagtggatgtaaggaaaagagctgttgaggaggggaggggtgggaggaagcagacccaggtggatgggtgcccagggatagagcagggaccactcactcaccaaggggcttccccgtgtggatgtcagtgaggaatcccggggcctgatttccacacaggatctggtagtcagctgcgcaaaggggaacaaagctgagtctggggctgcaggcctgaccccagcccgctcccaatctggaggggacacctcatccctggagcccagccctcacctggccaccttgaactttttttgctctccccaccctttccctccttccacttatttaatttaatttttttgagacaaagtctcgttctgtcacccaggctggagtgcactggtgcaatcacggctcactgcagccttaacctcccaggttcaggtgaccctcccaccttagcctcccaagtagctgggattacaggcgtgagccacgacgtctggtttttaaagccacctagtttgcagtaatgttttgcagcagctctggggaatgaatacagctataagcccctagaagtccccttcccatcactgtcccattcctgcagctcctcctggtgcctgggctggctgctagatcattccaacaggactcattcctgctgtcaacacactctgttcagtcctgcctccaggccttggctcctgctgtgcccctgcctagaacgccttccctcatcctgaccgatgttcccatcagggtcccaatcttggctctgagcttctccaggtctgccccttccccagcccaggaggtctatggtatctctaaccagctgtgctttcctccctggcctgggacatttaccgaccccctcccaccctatcccagcccaggaggtctatggtatctctaaccagcggtgctttcctccctggcctgggacatttaccgaccccctcccactttatcccagccccagctactcctgtgaatcttcaagggcctttcccaccaatgaaaactccattgatccatcctgaattctcgaaatctgcaaaatggaagaaaagctgccttgctcactttaaaatattgccttccatacatggggactgacacagtttggctgtgtccccacctaaacctcaacttgaactgtagctcccatatccccacatgtcacgggagggacccggtgggaggtaactgagtcatgggggtgggtctttcccatgctattctcgtgatagtgaataaatctcgtgagatctgacagttttataaagggcagttcccctgcacgcgctctcttgcctgccaccatgtaagacgtgcttttgctcctccttcaccttctgccatgattgtgaggccttcccagttatgtggaactgcgagtccattaaagtcctcctttttttttatttttttattttttttttgagatggagtcttgctctgtcacccaggctggagcgcagtggcatgatcgcggctcactggaaaccccacttcccgggttcaagcgattctcttgcctcagcctcccaagtagctgggattacgggcctgcgccaccacacccagctaatttttttggtatttttagtagagacagggtttcactgtgttggccaggctgttttcgaatgcctgacctcaagtgatccacccgcctcggcctcccaaaatgctgggattataggtgtgagccaccacacccagccaaacctctttttctttataaattacccagtatccagtatttcttcacagcagtatgagaatggactaatagagggacaaaacttcaactctctggctctcatcagaacaaggaggattaatctaagaaccctaagggcactgtgtttccttaaccattatgctaggaggggccaggctgggaagaaggttggggagggttactcacgactgatgggagtggggcaggcctcacagggtctattccaggcctggccaatgttgtaggagcagcaacacattttccgggtcacgttgaaggccagctcattttgacatgtgccgttatagtgccggaagcagacactcttcctcatatctgtagttggcacaaaggagaagaatgtgggtaagggtcacctaaatcagtggaagagggagccaaagagataggaactccttaactgattcatttgaagattactggcttgtccaggcacagtggctcatgcctgtaatcccagcactttgggaggcggaggcgggcggatcacttgaggtcaggagtttgagaccagcctggccaacatggtgaaaccctgtctctactaaaaatacaaaaattagctaggtgtggtggcacacgcctgtaatcccagctacttgggaggctgaggcaggagaatcgcttgaacctgggaggtggaggttgcagtgagccgagattgtgccactgcactccagcctgggtgacagagtgagactctatctcaaaaaaaaaaaaaaaaaaagattactggctggcttgattggcttgatgtctctcccccaacacacttgggggatccattcacttttttcagccttttttgagcagtgcacaacctgagcaactgttcatggcagctctgggctcctgagtcctgcagctttgtttactgccacatgtcagcacttcatatatgcttaccctccctctccataggcttgaaggctcccagcagttcctcccatgcccaggtgctgcttctgtgactgccagttccctaggtcatcacgcttcttacccatgcagttgttgccaccattgacttggaggtactctgcagggcagacacaggtgtagttccccagggtgttgtagcaggtgccagggccacagatgccggagtgtgtggagcattcgtcaatatctgcagggaaagaaggggtggaggggaacagtgggcagcgtccaggaattgtctgaataactccactccagagacccagcaaggccacttcaccagggacctaagtttggtttcaaaatcagtttaaaacgcacacacatcttagtgatgaagaaagctataatatgggctgggcatggtggctcatgcctgtaatctgagcactttgtgatgctgaggtgggaggatcatttgagcccggagttcgagaccagtctgggcaacatagcaagaccccatctctactaaaaattttaaaaaattagctgggcatggtggtgcatgcctgcagtcccagccacttgggaggatcacttgagtccaggaggttaaggttgcagtgagccgtgatcacgcctctgcactccagcctgggtgcagaatgagatcctggctctaaaaaacaaacaaacgaacaaaaacaatatgacattaagtgaaaaaaaaaaaaaaaaaacatttacaagctggatgcagtggctcatgcctatcatccctgctttgggaggccaaggcaggaggatcatttgaggtcaagagtttgagaccagcctgggcaacatagtgaggtcccatctctacaaaaaatgaaaatttagctgggcatggtggcacacgcctgtggtcccagctacttgagaggcagaggtgggaggatcacctgagtccaggaggtcaagactacagcaagctgtgattacaccactgcactccagcctggacaacagagtgagacactggctctaaaaaaaaaaaaaaaaattcctaaaaataaagttgatgatgatactgcttctattaggaacaaaatgacctgagttcatgagtcagttttataatcaccaagaaaggatcatccatgtcttcctaatatgatatgataggaatcaaggaccttatggataaagtattcttgggggaaaaaaattgattctcaatctggtcattactctagtccaggggtagtaagctttttctgtaaagggccagaacattttggttttgcgggccaaactacagtgtgccatgattattcaatctgccaatgtagcaagaaagcagacacaaacaatatgcaaacacactgtggcactggctgtgctccaaggaaattttatttatggacccctgaaatttgaattttatataactttcttttcttttcttctttcttccttcttctctttctttctttcttctctttctttctctctctttctctctctttctttcttttattttttttgagacagagtctcactctgttgcccaggctagagtgcagtggcctcatcttggctcactgcaacctccgcctcccaggttcaagtgattctcctgcctcagcctcccgagtagctgggactataggcatgtgtcactatgcccggctaatttttgtatttttagtagagatggggtttcactatgttggccaggctggtctcgaactcctgacctcgtgatctgcccacctcggcctcccaaagagctgggattacaagcatgagccactgtgcccagtcttttttttcttttttttttttttaagacagggtctcgttctgtcacccaggctggagtacagtggcacaatcacggctcactgcagcctcgacttccgaggctcaagtgatcctcctgcctcagcctcccaagtagctgggattacaggcgtgagtcaccatgcccagctatttttttaattttttgtagagacaaggttttgccatgttgcccaggtgggtcttaaactcctggcctcaagcaatcctcccacttcagcctcccaaagtactgggattaccagcttgagctgccacgcacccagccttgaatttcatataattttcatgtgtcacaaaatgttattcttcttttggttttttcaaccgttgagaaaagtgtaataaagtattcttagctagcaggcaaaaataggtagtggaatattagcatggtaagagtgatgtcaccaaaaatagcagagcagggaactccagggctccattcctccacaaaagcaactattgagctggcaaaacagacaaaaataaacttttgcagaactctggaatcagtcaaaagcttacaacatccagacaaagatatggtgaagaaggaagctgctgtacttcataagggagtgtcgtggcattttaaagggtctatctaccatcccccacaccacagatccacagcagccatgaacatcttaaaggcagcaagagagaactgacagatcatgacaaaagaggaggcagggggcagaagcctttccatgaggccttccctcctctacccttgtgaggcttggcagggcaggaaggcagggagagagcggaagagcctgacccaccccaaagagaatccatgctcaccctcacagatgcgggtgtgctcactgaggtggtagccaggtgggcactcacactggaaactgccaaacgtgttgacgcagtcacccccctgacacagccctggcagctcttggcactcgtcgatgtctgtcaggaagtaaggaagccaagcttgggagctaaacccatgcagaggacttaaggggcacccacaccatgctctgggttctccagggccctctcgaggatccccaagtgctgtccatgactgatagacatttaaagggtctatcttgatggctggacacagattctcttgagttaatgttaccctaaattcaactccattcccttcatctgttagtccattctcccatccaccacatagtttcctctagatagagaaatagatagttttcttcctctagatggagaatagtcttctccaaccttgtcactccctatagaaaggatggatgggaggatggatgaatggatggatgagtggatggatgcatggatatgaaacagtggatgggtaaataagcaagtgggtcaatgaataagatgatgagtgagtggatggataggaaggtggatggataggtgagtagacaggcaaatgagtgaatgggtggataagtggatggatggatggatggatgaatggatgaatagatgggagatagaagatggatggaagggtggatgaatgggggaatagaaagggagtagggaacgggtggatgggaaatgggtggatggatgagtggatggatggatgtattgaggatggatgggtgaatgggggatagatggatgggtgaatagatggatagaagaatgagagataggtgggtgggagatggatggatgggagagtgggaaataggttaatggatgggtgaatgcgggctagatgaaggatggggggtggatggatgggtgaatggatggatacaaggatagcagagggatgagtgatgaatggatgaatgggtggatggggcatggttggatggaaggatggagggatggatggaaggatggatgaatggaaggatggatgaatgggtagataaaggatagttggatggaaggaaggatagatgaatgggtagatgggggatggttgggtggaaggatggatggatggaaggatgggtggatggaaggataaatggacagaaggaggggggatggatgaaaggatggaggatagatgaaggatgggggataaatgggtgaatggatggatagaaggataggaggggaataagtggggggatggatgaatgggtagatggagaatggttggatgggtggaaggatgaatggatgaaaggatgagtggaaggatagatgaatggatggatggtcgagtggaaggatggatggatggatggatggatggatgaatggatggaaggatgagtggaaggatggatgaatggatggatggtcgggtggaaggatggatggatggatggatggatggagggatgaatggacagaaagatgggggatagatgaaggatggggaatgaatggttgactagatggatggataaaaggataagagagggatgagtggaggatggatgaatgggtagatggaggatggttgaatggaagtatggaagtatggaaggaagaatggatggaggatggctggatggaaggatgtatggatgtactggatggatggaaaaaatggaaggatggatggatggatggatagatggatgaatggctggatggatgggtagaaggatggatgaatggatggaaggatgggtggatggaaggataaatggacagaaggatggaggatgaatggaaggatgggggacaaatgaaaagatcaataaaccaacaagtggaagaaatggctgaaagaacagataaaaaaaattaaacacaaactaaaagcatagtgtggtcctgctgctcagcctccaggtggaaagatctgccccatcccaggacaaaactactcaactctacactttggtgaggtggggatgagagaaaagtcagtctctaggcagacagatggatggatgatctgccaggaactcaccttccagaatgacagtgatgcggttaggctggaagccctcaccacccgggcacagggttctgtactcagctgtaaagggaaacaggctcctgtgaggtggggtattggggcaaagcttaggggaaacaggggagcaacagcaggaagcctgaaaagggctcaagagtgggctcccatccttctactgtactaacgacatccccatatctctttagcctcttggggccaagagactttggccagtcctggggctgcttgcgtgtgtgtgtgcatgtgcgtgtgcatgcgtgtgtgtgtgtaaatgtgggttcccattcaacatgtgagcagagttatgtggtagtggctgggggtaggagggagagaagattattccttctgatccaaaaccatatcctagtgtaactgcaagttttccccatgcaaggaagaccttggacattcacacacgcatacacctgaataggtggacaggtacctccctgtttcacacctgaggcctttgcacatactgttctcactgcattgcacatcattccccctactctgctaggaaaactcctacacatccttcaaaacctcactcaagcctcctcccctggaaagccttccccagagctttcacttccccacagctttctcctgagctatgggtatgcctcaaagaaaacccttaggacagttctactctcacagtcctgaaactgttgatttaagggtgagggagaagcagcgtgcagaggctgtggctcatccttctctgagtccccagtccccagcacatgacacagaggaactctcaatatttgttgactgactgagtgatcaagtgactataaacacagagaatttacagaaagcgaccttggagagaggcccagccaatgaactaccaagacgtacactgtgtgacccaggatgagcccctctcctcccccagttcttggttttcctgtcgcctaagccccccaccaccgccattagcagaggtgaccccctaagctcccgggcctcggtggcttaggtcacggtgttcaactgccccgcagggactcactggtgttggccatagggcacagctcacagggattgccccaagcccggcccagggagcaacagcaggaagctcgggtgacaccaactccgatctcggcactgcaggaaatgccactgtcccctcggtcatgcgtctccaggaaacagttcccggcccgagtgtctgaacaggcagaaggggatggttagtaggtgtcagagggaaagctgtatgtgtgcgtgtgcatgcatgtgtctatttcaacaggtgacaaggacaaccactcttgcaggagaccagcagatgtcccgtttgtcaggagcaggtagatttgaacacgttgacatctgagttaacccagtggggcaatcccacccacctctgctgaccccagaaccctgatctggagttgagcatggactcacccacgcagcccactccgctggggttcagctcaaaatcctgggggcagctgcagaggtagctgccgggggtgttaatgcacacgccgttgatgcagtttactgggtctgcacactcgttgatgtctgtagggaggaagcgcggtcctcagcagggagccccttcctcggcccccctccctcctagcttcatcctgggaagctacagccctcgctcaaggtcaactcctgggcaccagattgtgggacaatgtcatgtccttccctgggaagaaacctaaggggacaggagcctccagtctgtcctgtcccctccaaccccattccctctcctgctctgttctgcctggcagagttttgttcattgaactctacctgccctgggttccatgcagtcaacatatgaaaatcatatctattttatttccgtaatttattgatgtttagagacagggtcttgctgtgtcgaccaggctggagtgcagttgcacaatcacggctcactgcagcctcaaactcctgggctcaagcgatccttctgcctcagcctttggagtagctgggactacaggtgtgcaccacaatgcccagctaattttttatttttactttttagagatgaggtctcgctatgttgctcaggctggtctccaactcctggcctggagtgatcctcccacctcagcctcccaaagtgctgagattatgggcatgagccaccactcccagccaaaacccatatatagaaaatactttcaaaccatgggttagcaaattccaacctgtaggtcaaatccggtccaccacctgtttgtgtcaataaagttttattggtacaggggccacattcattcatttacatattgcttgtggctgcttttgagctacaatggcagagttgaatcattgtgacagagactgactgtgtggcctgcaaagccaaaaatatttaccacctgcccatttctaaaacacacagaggtaggagaccctttcagcagctagcgtggaggggccacttcaatcacagaacttatttagcaggcgaacaggaacgggaaatgatggggacatcaggcaaggcgccccccaccccccagcaagactgcaggggaggatgcttgaaaagagatctgagggcagtgagggagtgagccatgtcccctgccccaactcctgctctctcctctccccttccagcccagatgacctcacacctgtgcagttgccaccccctcggtccagttcgtagccaccattgcagatgcagcggaacattccaggcaggttctcacagctcccaaatgcacagaggttcccttgcgcacactcgtccacatctgcggggaccctgggtcagcctgccccacccagagtctgcaggggggacctacccactctgtcctctgccctggcgggcccaaccttaccctggcaggcccggtggtcctcggtggggtcaaagcccatctcacattcacagcggtacccgccgggcgcattgaggcactgcccgttgtcacagaggtccacgttctcggcacattcatccctgtctgaggggccccaagattcggagggctggaggccggtggaccaggacccacacagggtgggcaggaggccccagtcactggaacacttcgctgtcagccagagtcccaggcaagtagccctggggactcagtccctgacttgggggtgggaggcgagtgaccgaggcagggacagggaggggagaggtggtctggactcttggactccagagaggggacccagtctctctggatccagggaggagggcagccaggaaggaagcgtctcatgcacttaagtgttcaagggagccgtgggcaggccgcagcaccgcctgggccgaggacacagcctctccagcacccacagagcggcgattgagtcagaaggagtcaggaggtcgagtgaccatggcagccaccgtgaattcagcccccgtggctgtccctctagggcccctgccctcccacccctctaatctcaccttcgcagaagaagccatccccggcaaagccctggcggcaggtgcagcggtaggagccagggacattgagacagtcacctcttgggctgcaccggtgctcctgggagacgcattcatccaggtctgcaggagatggagcccagaccccccaccccatggtgtgtgcattgggtgggcgcagaagggagaaagacccatcaaccctccaaccctgactgcccccctgcagacactcccggatcccaccctcccactgccttgccccccaccgccttgccccccacctacctctactgctttgcccccactccctgcccccaggtactcaccgtgacattcgaagccatcccccacccagcctggcaggcacctacagctgaaactccccgggatgttgagacaggaggcgtgactgtcacagttgtgtcctccaacctcgcattcatccacatctaaagggagaggaggcacgacgccaagacccagtcacagaaggaaagactcgatgcaatagcagcggaaagggcagggactcttcctctctaggggagagctggcccagaaagcctcctcccattcacctggggagcttccatctttacccagagcccaagaggaaaaccccgaaacccaacagacatgactctcagcagccctcagaaatggcctgaaatagcagcatgaaagacttggggtagatattaagagtgactgtccagccgggtgcggtggctcacgcctgtaatcccagcactttgggaggccgaggcgggtggatcacgaggtcaggagatcgagaccatcctggctaatgcggtgaaaccctgtctctactaaaaatacaaaaaaaaaattagccaggcgtggtggcaggtgcctgtagtcccagctactcaggacgctgaggcaggagaatggcgtgaacccgagaggcggagcttgcagtgagcagaggttgtgccactgcactctagcctgggcgacagagtgagactccgtctcaaaaaaataaataaataaaaaaataaaaaagtgactgtccgtatgaacacgccccttttccaagccaggatttccctgtccaccagcatttccaatccagagtcaattatgcctcacccttatgatctctgccatgttaaaccttggtgagctgctgttactaaacatttctttcccacacttctgttttccctgacataaattgtgttttaaaagacaattttggatcaacatcaacaacctctaagaagtcataggcttgatgctctgttatgtaacacttgtttctaatacacattaaaataaccatgtaactggagtggatagaattgtgtccccttaaaaggtatgctcaagtcctaaaccctgaaactggtgaatgtgaccttatttggaaacagggtcttcgtagatgtaactaagttaagatgaggtcatcccggattagtgtaggctcccatccagtgatgagtgttcttttgagaaggctgtgtagccagatgcaatggcttacacctgtaatcccaactacttgggaggccaaggtgggaggatcgcttgaggcaaggagtttgagacgaggttgggcaacatagtgagaacctgtttctacaaaaacacttttttttccccctgaggcatggtttcactctgtcacccaggctggagtgcagtgcaatggtgcaatcatagctcactgcagcctggatctcctggtcttaagcaatcctcagcctcttgagtagctaagactacaggtgagcgccagcatgcctggctattttttaaaatttttatctcaaacacctgagctcaagaatccttccacctcaatctcccaaagtgctggcattacagaaatgagtcaccatgcctgatcaacaaacacttttttaaaaattagcccagcttggtggcatgcacctgtagtcccagatactcaggaggctgaggctgggaggattgcttgaacccaggagtttaaggctatgaactagttcatgagctatgatcacaccactgcactatagcctgggcgacacagcgagacctcatctttacaaattagatactactgggtgcagtgactcgtgcctgtaatcccaacaaattgggaggccgaggcaagaggattacttgagtccaggagttcaagaccaacccgggcgacatagtaaaacactatctctacaaaaaaaaaaaaaaaaattagctgagtgtggcggcacgtgtgggaggctgaggtgggaagatcacctgagcctggagaggtggaggctgcagtgagctatgattgtgtcactgcactccagcctgggagacagagtgagacactatctcacaaaaataaataaataataaataaaatgtaaaacatgaaaaataaaaaaaaatagatacacagagagaagaaggccgtgtgaagatggagacagagactggaatgacacatctacaagctgaggaacagcaaggaggcatggaacactttctgcctctgagcccccaagaaggtactaaccctgtagacaccttgatttcagacttctggcttccagaactattattctagaaggagaatcaatttctttttaattaaaaaaaagtttgtttttttgagatggagtcttgctctgtggcccaagctggagtgcagtggtgtgatcttggctcactgcaacctccgcctcctggattcaagtgatgctcctgcctcagcctcccaagcagctgggattacaggcgtgcgccaccacgcccagctaattttgtatttttagtagtgacggggtttcaccatgttggccaggctggtctcaaactcctgacctcaggtaatccacccacctcagcccccaaagtgctgggattacaggtgtgagctaccctgcccaggctaatttttaaaatttttaatatagatggggttgctgtctctattaatgttgccatatggccgtgttgtgatgtatccatgtcacccaggctggtctcgaacccatgggctcaagcagtcctcctgctttggcctcccaaagtgctgggattacaaaagtgtgagccactgcaccaggcggagaatcattttacttattttctttttttttttgagacggagtctggctctgtcacccaggctggagtgcagtggctcgacctcggctcactgcaagcttcgcctcctgggttcacgccattctcctgcctcagcctcctgaatttacttattttcttttgagacggggtctcactctgttgcccaggctagaatgcagtggtgctatcttggctcactgccacctctgcctcccgggttcaaatgattctcctgccccagcctcccgagtagctgggattactatgcctggctaatttttgtatttttagtagagatgggtttcaccatgttgaccagactggtctcgaactcctgacctcaggtgatctgcccgcctcggcctcccaaagtgctgggattacaggcatgagccaccgcgcccggcccagagaatcaatttctaagccaccaattgtgtgatcatttgttatggcagccacagggaactaacacagtcactattcaaatgtttaagtgttcatccctgtattgcatcaaattatgagggattcacgtttcagaaatgctgctgcagacacttggggcttcccttcctgagctgttcaggggaccccccggggcactgtataggactctgttcttgctttaacacaagaagccatccgtggaaatctatgagaatgaattctggctgtgctctgccctgggggatggaaacagaccccatgattcccaaaatggccccggggagtcccctctgcctgcaccgctgaccgccggctcaccagagcagcctgtggcccccttcctgaccatgtagcccagctgacagtggcagacaaaggaacccttcgtgttctcgcagtccccatggaggcagatgtgagggttcaggtcacactcatccacatctgttggggaagagagcatgaggtctgaggactgggtgcaggggtgacaggagaggaagtaggtgagggtgggagggagatcaccagcattcctgactgtcccgccgcacaggtcctctctgctaggactctctttcttttctccaggggcggggagctccctctatgtccactactgggcaattgggaatgttctgtgagcgtttcacagtgtacattccaaggaacacaccaggaatgtgtttccaaaagtattttatggtcaaatatatttagagaaggctgagatccacaaagctaaccagggtttcctcctgcaggacttttcagagcctttatgccaatatgcacagtgggtctgcaacaggggcatggagcagactgcattccctaaatgcatttgttcacaaggcccatcgctgaagcacttgctctctgagactcctataaactgcaactctctaagctctttaagcttcactcggtttcttggccgggagttacattgttacttcccggaacttccacactctggcctcagctttgtcctgatagggtatgcagtacacatctgctccccaggccctaggacaacctgtagccaggtgaggacagcagtcgccaccttagagaacagagttctgagtctctttcctgccttgtccactgtcctctgccagaaacccctttgtcttcagtgatcttaaagcacagcccttgaacaggacacaatcctctgatagatgttgggtatgtcatattaaacaaatgccatttaaaagagcaaggtttggggaattctgcttctgttatataaatgggatctcatgggctttggagagcagacttggggtgctggggacccttatgtggagaagcaagtgctgttacaaagcctcatcttcctacctgcgaatggcaggggtggggcctggcatttttcatgcctatgtgccaccttgtggaagacctggtgtgtgaattctgacactgcctcctccacccgccccgccccaccgtcccggctcctcaccaacacatgtcctcatgtctggcgtggccatgaagccatcatagcacaggcagcggtgaccccctggcatgttggtgcagtggccttggtcacaaacgcgggggttctcttcacactcgtccacgtctgggggagcagggttggggactgtgcttagctttgccctgatagaccacccagtacacatctgctccccaggccccaggacgacctgtagccaggtgaggatagcgatggtcactcgagtagtctgggggcgctcaagcagttctgaggttcttttccaccttattcaccctcctctgcaaaaatcccaggggctctcccacagggtgagcagcctgcctggggccaggaccacaggccaggcagggggtgcctcgggtctggctggcttcactatgctgtgctgggctctgggccagtgcaggacccagccaacacctcctcctcaccctccacaccaggcagtgggaagaagttgtgcccacctacctgcacatgcccttccgtcgggcatcagcgagtagccctgcccacagctgcaccggtagctgccctcagtgttaatacagtgcacgtcacacccaccattctggacccggcattcgttgatgtctgcaggatgcagggcagacaggggctggggctggggggaggggtccaggatggggagggggctggtttgggggtgggagcagagtggagttgaggtgaggacaggaggagctaccactatgtctgggactgtggttggtgcccaggggccagcaggtgggcacagtctcacccacgcagccctggcggtcaggtgtgctctggaagccggcatggcaggagcactggaaggcaccgatgacattgacacactggccatggggacacaggccatcactcagggagcactcatcgatgtctgtgggggagtgcaggtgaaagacgggcctgtgccccatctgccgtctgtgtgaccatgagacacactgggggcacacatgcatgctaaggagctcacactgccagcattggcacagccccgcatgtgcctatccgtacacttgcattcactcacatgcaaatacactcactctcctataagcacagacacccatatacacaccccacgtgcccgctcacacagactcacaaacacaccctggcacccactcacgtgtgaacacactcacccttgacagacacacacaggcacactcagatacacactcacactcaagtgcacactcctaaattcacaacacaccttatatccacttgcacacaaatacactcacccatgtgtaaatacacatccacacccaggggcacactcacacccatgtgcacacacagacacacaaacacccaatgcacactcacacatacacacacacccatgtgcacactcacacagacacacacataaacacaccctcaaacatacctgtccttgtgcaaacacatgtccacacccagacacccacacccagaggtacacccacacagacccactcaaacacattctcacacccactcacacacaaacacacctctataaacatgcatttgcatccaactacacatcacattctcttacacacacacacacagacttacgtacaaacacacccactcagaaattagccaggcatagtggcgcatgcctgtagtcccacctacttgggaggctgagatgggaggatcacctgagcccaggaggtggaggctgcagtgagctgtgattgtgccactgcaccccagcctggacaacagactgggaccctgtctcaaacaaaacaaaatgaaacacacctacgcacatgcaaacacacttgcccttggtagagacattcatagccaaatacacactcaaaccctcttgtgtgttcacacagacgcacacacacactcactcctcacatacaaacactcccccttgtacagacacacagtcacacaaatgcacaaacgcttgcccttgtacagacactcacacatgtgcgtgttcatctagacacacaaacacactcccgccatcttgcatataaacccacttacacacacagatacacacacacacttgcacgctcacacataggtatggcctcagaaagacagatacacatgcccaccctctcactcatccagcccacattcaccagacatccactcactttcacacacatgggctaacactcacacttgcacacccagatgcacacttaccctcacaggcagtgcccttggccgtcagctcatgcccagggggacactggcacttgtagctcccatccgtgttggtgcaagtgcctccccggcagagcagcgggtcccttgcacactcgtccacgtctgaaggtttgtgtggaaagagagagcaggcatgaaggtgctgatgcagggagggggtgatgaggctcatgctggcttctctccgccacctccccagcccccttcaccccagcgggagccaggagagcctggaggctccgggttgggatgacccaggggagtggggtctgcaccaggagcagagaccagccagatggggagggaggctgagattctcagaagaacaaaggccacgaagctgacactcttggggccactagaaacggcactaagaggccttcctccactccctgcaggacacgccagaaagctgaggctcagtcccgccaggactcagggcagggagcaggcagcctcgccatggcctcatcactcttcagccacagaggcatcatccttccatccctcaggcccaccccagggcctttgcacatgctgttctccagtgtcttcacccttttcacccccactccattctttctttctttccttttgttgttgttgtttttgagatggagtctcgctctgttgcccaagctggagtgcagtgacacgatctcggctcactgcaacctccgcctcctgggttcatgcaattctcctgcctcagcctcccaagtagctgggattacaggcatgcatcaccaagcccagctaatttttgtatttttagtagagacagcgtttcaccatgttggccaggctggtctcaaaatcctgacctcaagtgattcacctgcctcagcctcccaaattgccaggattacaggtatgagccaccgagcccagcctttttttttttttttttttttttttgagacagattttcacactgttacccagcctggagtgcagtgacacgatcacagctccctgcagcctccacctcctgtgttcaaactatcctcccacttcagcctcctgagtagctgggactacaggcaggcaccaccatgcccggctaatttttaaattttgtgtagagacggggcctctctatgttgaccaagctggtcttaaactcctggtctcaagcaatcctgtctcagccatctctcatcagatcatgtggcccttttaagggcttctgacagtggcaattttgcatttttttcttttcttttctttttctttctttctttcttttttttttttttttaatttggagacagaatctcgctctgtcgcccaggctggagtgcagtggcgcgatctcggctcactgcaacctccacctcctgggttcaagcaattctcctgcctcagcctcctgagtagctggacctacaggtgcacgccaccacacccagctaattttttgtattttaatagagacggggtttcaccatgttgcccaggctggtttcaaactcctgaactcaggcaatctgcccacctcagcctcccaaagtgctgggattacaggcatgagccaccatgcctggctttttcctcttccttccttccttccttccttttttctttagacagggtctcactctgtcacccaggctggagtgcaaaagtgcgattatggttcactgcagcctcaacctcctgggctcaagggatcctccctcctcagcctcccgagtagcacgcgccaccatgcctagctaatttttaaaaaactttatagtgacagggtcttgttatgttgcccaggctggcctcgaactcctggactcaagcaatcctactgcctcagcctctcaaaatgctgggattacaggcgagggccactgcacccagcccagttttgcatttcctcagcgattcatgttattcatgtctgtcttcctgttaggctgtgagctccaaggaaagagggctccctggagctagagctccctgcagtgcctctagctcagaggatgcatgtgaaatgctcatcaaatgaataacgaagtcaatgatggggacgagaggcctcataaccggcagtatttcccaggcttctctgagggtccctgtcctctacccaagctacacaccctccctgggagaccacaccccagtgtgccggccacccccaggtctcaggccccaggtctctctcctaaggacgaggcctcatggagcccagactcactgtacctcagctaatttacagctcctccctcctcctgccccctccatccacgtccacacagcaacagccgtccccaccctccctctcctcaatgccctccctgcccagggcgcccaccacacccctgcccggcagtcaccgacccatgcagttcttcatcagcatgaagccactctcgtagccgggaaaacactcgcactcaaagctgcccggcgtgttgacacaggtgccctggccgcagaggtcaggagagatgcgacactcgtcgatatctgtggggagagggggcagaggccggaggcgccatgtgggccgcatcatggggcacgaggcaggggggtccctgtcctttgatggaggtgtgggctagaggaagcccatctgcagacataaggaggcacaggccaagaggggaggcatgatgcaggcatgatggggtgccgtatggggtcatcgaatctgtagatatgacaggcagaacagaagcccccaaaaggagccgaggaaatggaggaaccccaaactaaacatgacaagggcaggcagttttctcacagacgggagttctccattttctttattttgatggtagatttgtttgtttgttttattttattttatttttattacttatttatttatttacttttttagagacagagtcttgctctgtcacccaggatggagtgcagtgatgcaatctcggctcactgcaacttctgcctcccaggatcaagcgattctcctgcctcagcctcccgagtagctgggattacaggtgtgtgccaccatgcccggctaattttgtatttttagtagagatggtgtttcgccatgttggccaggctggtctcaaactcctgacctaaagcagtccacccgccttggcctcccaaagtgctaggattataggtgtgagccactgagcctggcctgtttgtttttcactcaggctggagtgcagtggtgtgatcacagctcactgcagcctcaacctcccagggcctcaagggatccttctacctcagcctctcgaatagctgggactacagttaatgcaataataatttttttattttttgcagagatggaggtctcgctgtgttacccaggatagtctcaaactcttgggctcaagcaatcctcccaccttggcctccaaaagtgctgggatcacaggcgtgagccaccatgctggccctggaggcctctaaaggtcacctttgccagccccttcttttatgttttatttacttatttatttatatttgagacacagtctcgttctgtcacccaggctggagtgcaatggcacaatcttggcttactgcaacctccgcctcccgggttcaagtgattctcctgcctcggcctcccgagtagctgggattacaggcgcccgccaccaggcccagctaatttttgtatctttagtagagacggggtattgccatgttggccaggctggtctcgaactcttgacctcaagtgatccatctgccttggcctcccaaagtgctgggattacaggtgtgatccatcgcacctggcccagcgcccccttttttttttgagatggagtctctgtcgcccaggctggagtgcagtggcatgatctcagctcactgcaagctctgcatcccgggttcacgccattctcctgcctcagcctcccgagtagctgggactacaggtgcctgccaccacgctgggctaatttttgtatttttagtagagacagggtttcaccgtgttagccaggatggtctcgatctcctgacatcgtgatccgcccgcctcagcctcccaaagtgctgggattacaaatgtgagccaccgcgcccagcccagccccttcttttatagtcagggtccctgcagcccaaggagggcaatcacctgccctaggtcacacagcacagaggcagacacaagaagtgcccaaagaacaggtgttcgccaggcacagtggctcacacctgtaatcccagcactttgggaggccgaggtgggcggatcacctgaggtcgggagttcaagtccagcctgaccaacacggagaaacactatcactactgaaaaatacaaaattagccaggcatggtggcacatgcctgtaatcccagctacttaggaggctgaggcaggagagtcgcttgaacctgggaggcggaggttgcagtgagccgagatcgtgccattgcactccagcctggataacaagagtaaaactccgtctcgaaaaaaaaaagaagaagaaaaagaacaggtgttgtctctacgtcttatttgaggcccctatccctgccaaggatcacgctctctccaagaggcagaggtggcacctacctgtgcagttccgttcctgggcatccagggcgaagccccccgcacaggcgcagtggaagctgcccaccgtgtttctgcaggtaccgtgcgtgcagaggccagggaacaccttgcattcattcacatctgaagtacaggggcatcaaaccaccctgacgtccccaagctcaggatccatacaccaagccctccctgggttcttagtgcctcgccttacccacatccccttttcccccaaacacacttcccatctccaggcttttgcctatgccgtgcccctccccatccttccaggggcctgaccccttccccaaccgcacctttatagaatggtcggccagacaggaagtcccggctggcgaagcccagcccccgcgggcacaggctggcgaactccagagactcgggatccgggcaggcctcgcactcgactccccacacggccccgatggagcagcagcagacgtccatccggtacttgccaggcagggtgaccccacactcatcctcatcccatcgcaggaaacatggttccaatctcacatctgcacgggggacagtcactgcgtccccacccctgccacactgtgcccactgcgggacaggcgtgccgctcagtcactcccatcggaaactttctcccggacgtagtcaggtcgagggccagagtggaaaggggtgacttcctccaggcactgtctgggagggtactatgtgtactgttctgtagcactgttctaagcccctctatccatattttttttacgtgattgattcattggttgattgatttcttttgagacatagtcttgctctgtcactcaggctggagtgcagtggcacaatctcagctcaccataacctccacctcccaggttcaagcaattctccggcctcagcctcccgaggagctgggattacaggtgtgtgccaccacacccggctgacttttgttattttttagtagagactcggtttcaccacgttggccaggctgatctcgaactcaagtgatctgcccgcctcagcctcccaaagtgctgggattacaggtgtgagctaccgtgcctggccaatttttttttttttttttagacggagtcttgctctgtcccccaggctgtagtgcagcggcacaatctcagctcactgcaacctccgcctcccgggttcaagcgattctcctgcctcagcctcccgagtagctgggattacagacaccgctaccacgctcacctaatttttgtattttagtagagatggggtttcaccatgtttaccaggctggtcttgaactcctaacctcaagcaatccacctgcctcggcctcccaaagtgctggcattacaggcgtgagccaccatgcccggccactaaggatttttagggcagagaaactaccctgtatgacactacaatggtgaacatacgtcattatacgttcgtccaaacccatagaatgtccaatacaccaagggtaaaccctaaggtgctctatggacttagagatgacaatgctgtacccgtgcagtttcatccatcgtaacaaatgcaccttctaaccccagtgcaagatgttgagagttggggaggctgtacgtgtgtggaggtgggggctatgtgttcatatttgctgtgaacctaatactgtcctcaaagataaatcctggctggacttccagcactccgggatgctgaggtagggggatcccttgaggccaggagtttgagaccagcctaggcaagagagtgagaccctgtccctacaaaaatatatatagatataccaataaataaataaattagcgggtgtggtggtgcacacctgtagtcccagctgctcaggagatcaaggtacaaaaatcagttgaacccaggaagtgcaagttgtagtgagatgagattgcgccactgcactcctgcctgggtgacagagtgagaccctgtctcaagaaaaaagaaaaaaaaacccacccaaatgtctttcatgatatgttagccagaggcagaggatcccaaaggatgcctgaaatctctcctgttcaggccaggcgtggtggctcacgcctgtaatcccaacactttgggaggccgaggcgggcagatcacctgaggtcagaagttcgagaccatcctagccaacatggtgaaaccccatctctactaaaaatacaaaaattagctgggcgtggtggtatgtgcctgtaatcccagctactcaggaggctgaggcaggagaatcgcttgaacccgggaggcggaagttacagtgagccgagattgcgccactgcactccagcctgggcgacagagcgagactccatctcaaaaaaaaaaaaaaaaatctctcctgttcctcaagtcactgcgggtggagggaacaaaggaagaacgtgtggccctgtatgcggacctcgcctggactcacccacgcacagccggcctgaggcgtccagcatcaggccctctggacactcacagcggaaagacccagcagtgttgacgcaacgcccgttgggacagactcccgggaaggactcacactcgttcacatctgggtaaggaggagggaaagccggagggtccagggaggggaagggtgctggctggccattcccctggggtctcaagttgtccttgaggaggaaggaaggggacggggacacggggactggggactttcaagaaggcctggggaccaggtagggagaacgtctgtccccatcgcaaaagactccagggcggggccggaggtggcacccatgagggtggtgcgcctggttgtgtgcgggctctggagtagggggtgagctggacacgggcaggcagttaccatcgcaggtgacacccgtcatccgggcaaagccccgggcacaggcagggtctgcaactgggagaacaagagtgaagagaggagtcattttctcatgccagcccaaggggggacccgccccatggagggcttttcccatgggtgcctgggaggcctcaaggaggatactaccgatctcgcagcgttcgcaggggctcccccaggctgccccgagggtggcgcagcactcagaccgcaggctggctccctgaaggttcacctcacagcggctctcctggatcttcagccagcaggtgcccttggtgctgtctggggagaagaggcgggtcacctgtctcacctgccggccctacacctgcaccctgacccatagacgcccagcctctggaacgccgtcgggctccggggccgctcacctagacagaaggtaccagaggggtccagccggctgccagggccacatttgcaggtgtaggagccggccaggttccgacagacgccactcacacacgggctggacaggcattcgtcgacatctgtggggacagccccccaccaggtcctgagctgcaggaggagttgccttacctggccaggacccctcctccccaaggggccgccgcaaccggtggcacggggtgcacccagatgcacaagcatgcagagggcactggaatcaaatgtgcatgcaagcacatgtgtgtgctgagctgtgtgtgtacatgctgtaagagacaggaaatgccaaactgttttttttttgttttttttttttttttgagacagagtctcgctctgtcacccaggttggagtgcagtggcaccatcccggctcactgcaacctccgtctcccgggttcaagcgattctcgtgcctcagcctcccaagtagctgggactacaggcatgtgccaccatgcctggctaactttttttgtatttttagtagagacaggatttcatgatgttggccaggctggtctcaaactcccaacctcaggtggtccgcccgcctcagcctcccaaagtgctgggattataggcgtgagtcactgcacccagccaaaactgtattcttactctcaccttcaacacaacacagaatacatcagtgatcagacatggggttttttgtttgtttgcttttgccaagctgcccaattctccgacaccagcagggtgccctataattcaattctgacgctttctgcctggagttaaagtctgactccacaggttgagggctcagtcccacaagactgtcttccacaccagatgccagttgcaaatcggggcctccagaatttctgccttctcctcgggcttgatcatccgctagaggggctcacaggactcagggaaatacttaacttacgtttactagtttattataaaggatatcacaggctgggcgctgtggcttacgcctgtcatcccacctctttgggaggcagaggcgggtggatcactgaggtcaggagttcgagaccagcctggccaacacgatgaaacaccatctctattaaaaatacaaattagctgggcgtgatggcacacgcctgtagtccgggctacttgggaggcagagacaggataatctcttaaacggcgggagaattgcttgaacccaggaggtggaggttgcagtgagccgagatcgccccattgcactccagcctgggtgacagagcgagactctgtctcaaaaagataaaataaaaaaaataaaggatattacaaatgatgaacagccagatggaagagatgcacggtgcagggtatctgggaggagatgtggaacttccgtgcctgctctcggcatgccgccctgccagcacacagatatgtccatccacctagaagctctccaaactctgtagttcgagtaggacttctgggatgtgtgtataactgtgtgcccctgagtgtgtacaaccatgtgtgactgggactgcaagtgtgggaagtgtgagaatgagtgtatgggccaggtgtagtggctcgcgcctataatcccagcactttgggaggctgaagcaggtggatcacttgaggtcaggagttcgagaccagcctggcgaacatggtgaaaccctgtctctactaaaaatacaaaaattatctgggcttggtgacggacgcctgtaatcccagctacttgggaggctgaggcaggagaatcgcttgaactaggaggcagaggttgcagtgagctgagatcgtgccactgcactccagcctgggtgatagagcaagactctgtctcaaaaaaaaaaaaaaagaatacgtgtgtatgtaaatgtgagtatatatgtgtctttgagtgtgtatgtgtgaatgtaggtacatatgcaagtgtctttgagtatgcatgtctgtgtacacatgcacacagcatgtctgaatgtgtgtctgtgtatacacggcatgtgcagcgtgtctgggtgtatgtatgcatgacacatgcaacgtgcatgtctgagtgtggttgtgtacaggatgtttctgagcgtgtgcatgtgtgtcttgtgtacacacctcatgcaacatgtgagtatctgagcgtgtgcatatatgtgtgtgtgcacactacatatagcatgcgtgtgtgaatagaggtaacatgtaagcatctttgagcgtgtgcatgcctgtgcgtgcacacgccacatgccaagtatgttggagcatatgtgtgtgtgcaaacccacgtgagcccgggacccagtacctttgcagatctccgtgtcctgccagaagtggaagccgggggggcaggagcagctgtagctgccagggctattctggcaccacccgttgtcacacaggaggctgttgagggcacactcatccacgtctgtggggtgggggtgggagagaggggtgaggggtctgcagtgggagaggctgcccacacatccgcccgccaggtggcatgctcacctgtgcagtccttgcctgaggcacctgcctcataacccaggttgcagacacagcggtagctgccccgaaggttctcgcacacgccattggcacaaacctcaggatccagagcacactcgttgatgtctgcggcaggaggagggtgtgtcagcagcagcagaaggagggtgtgtccgaggcaggaggagggtgtgtcgcggcgcaccaggggtctctagaagtcagattccccaaggccatagctccagcccagacccggcctcattctgctctaaaccgaggtttctcagcctggacactgctgacatttggggccagatcattttttgctgtgaggggccatcccacgcattttaggatgtcgagcagctcccgtggcctccacccatgagatgtcagtagcacccaccgccccagtattactccagacattgtcaaatgacctcggtggggcaggggccaaattatctccagtttggaaatagtggagcagacatccatacagtggcactgtcataaaaataaaagcaattataggccagatatgatggctgtcacctataatcccaccactttgggaggctgaggtgggaggattgcttgagcccaggagtttgagaccagcctgggcaacatagcgagacccatgtctataaaaagcaatttttttttttttgagatagggtctcactctgtcgcacaggctggagtgcagtggtgcgatctcggctcactgcaacctccacctccctcgttcaagtgattctcatgactcagccccccaagtagctgggattacagccgcctgccaccacggctggctaatttttctatttttagtagagatggggtttcaccatgttggccaggctggtgtggaactcctgacctcaagtgatccacctccctcagcctcccaaagtgctggaattacaggcgtgagccaccgcatctggccataaagtaaatgttttaaaaattggctgggcatggcagctcgtgtctgtaatcacagcactttgggaggccaaggtgggtggatcacttgaggctagaagtttgagacaagcctgggcaacatggcaaaatctcatctctactaaaaaaaaaaaaatacaaaaattagccgggcatggagctgcatgcctgtaatcccagctatttgggaggctgaggcaggagaattgcttgaacccaggaggtggaggttgcagtgagccaagatcacgccactgcactccagcctgggtaacagagcaagactctgtcaaaaaaaaaagaaagaaagaaagaaaagaaagagaaagaaagagagagagagagagaaggaaagaaagaaagaatgaaagaaagaaagaaagaaagaaagaaagaaagaaagaaagaaagaaagaaagaaagaaaggaaaggaaaggaaaggaaaagaaaagaaaagaaaagaaaagaaaagaaaagaaaagaaaaggaagaaaaacaaatgagcaggtcatggtggtgagtgcctgtagtcccagctactcaggtggtatcacttgagcccaagaggtcgagtttgcagtgagccgtgattgcaccacatcactcgagcctgggcaatagagtgagatctcacctctaaaaaagggtggggggagttttggacacagacacgcatacagggagaacaccatgtgaagatggaggcagagatggggtgacgcctctatgagccaagaaatgccaaagattgctggagccaccaccagaagctggagagaggtccgggacagattctccctcaaagcctccaagggaaccagccctgcccgcaccttgatctccgacctctggcctgcaggagtgtgagagaatcagcttctgttgttgaagccgtctggtctggggcactttgttacgggaaccccgggccaactcctacagcctcccaccacagctctccccacatctggtaggggcaggctggctgctgtttggaggggctgggctccacttacctcgaccatccgtggtaatgccaagcccactgctgcacagtgcctggaactcagctggggatggagggacagagtgagacgggtcagggagcttagccatggctcggattcagccacaggcaaggatgaggccctctggtcttgggcaagagtttgggactaagacacaactccaaccccggggagggagcaactcccttcagcctctttttgggaagagcccccactccatggcagccatgaccccccaccagaagcgagaaccgatggaggcattcagaccaaggaggcgatggggaccgggcagccggatgctcaccggagtctttggcaggacaaagctggcagggctccccaaaaccgtggtccggattggcacagcagcactcggacttggtgacagtgccagggaaggggcgggcacaggagcccttctcgatggccccatagcaggtgctgcgcacgtgggtgtccacgcacacgcggccatccgtgcctaccgccagcccccccaggcactggcagcggaaggagccctcggtgttggtacagtggccgttcacgcagatgccgggcgtctggcactcgtcaatgtctgcagaagcagtggcggcacggggatgggttccagcgtgctcccttcctctctcccctccccatctcccaacatttccatcttcccagccattctatttctttcctttccagtttcttgtctttccagtttcctgttgtctgtgtctctgtcctctcctcctcttgtctccttcctcttctcctctcccattattccccatctttctatctttctctccacctttaaacaaattttttaaacgcagggtctgacttccagactggagtgcagtggcgtgatcatagctcactgcggcctccaactccagggctcaagtgatcctgctgcctcagcctcccgagtaggagggactacaggggttcatctccatgttcggctaatttttaaaaattttttatagagacggagtctcatcatgttgcccaggctggtctcaaactcctgagctcaagtgatccttctgcctcagccttccaaagtgctgggattacaggtgcatgctaccatgcccagctaattttttttttaggtagaaatggcgtctgactatgttgctcaggctggtctcgaactcctgtcctcaagtgatcctctaacctcagcctcccaaagtgctgggatcacagatgaacctggcccctccccaccttataatgcatcactttttttttcttctgagacggagtctcactcttgtcacccaggctggagtgcaatggcgcgatctcggctcactgcaacctctacctcccaggatcaagtaattctcctgcctcagcctcccaagtagctgggattacaggtgcccaccaccatacctggctaatttttgtatttttagtagagatggggtttcaccattttggccaggctggtcttgaactcctgacctcaaatgatccatctgcctcggcctcccaaggtgctgggactacaggcgtgagccacggcacctgcctcttcttttcttccttttcttcttcttcgcttctccccttttccctcctcctcctctttttctccctgccccttctcttctccttctctcatgctcgtcccatccccgtccggtccctctcctcttcctcgccgtccctctgcttccccatctcccttctcccctccgctggccagtctggctccaggctcacccatgcagtagtggccgccaggcgccagcaggaagccgggtttgcagaggcaggagaagctgccatcctcgttgagacacacgccgttgacgcacatggtgctggtggcacactcgttgtggtctggggacaacagcagaggctgggtccaggcagggaccacactgggaccctctctctccctcctccaggctccagggctgaccccccaggatccctccctggagtgtgggaggcaaacaagctgtggttgtctgtgactgtgtgagcttgtatattagtccgtccgctgggacgttgagttccccggggcacgacccctgtcttactcaggctgcaatacagtaggtgctgcataaataattgctcaaagctgaataaacgtggtggtttttgcacaacattggaaatttattaaatatcagtgaattgttcattttaaaatgtttaaatattttttaaaagacaacaatttttttttttttgagacagagtctcgctctgtcgcccaggctggagcacagtggtgtgatctcagctccctgcaacctccgcctcgcgggttcaagcgattctcctgcttcagcctcctgagtagctgggattacaggcatgtaccaccacgcccggctaattgtttttgtatttttagtagagacggggtttcaccatgttggccaggctagtcttgaactcctgacctcgtgataagcccgcctcgtcctcccaaagtgctgggattacaggcgtgagccaccgcgcccaacctcttgttcacttttaaatgattaaatttaggttgtgtgaatcttacttcaatttcataaaaaggaaatggaaataaagttagtaagaccatggtctaatttaatggaaggtggcaggggcagaaatgagttgttttccaaaatgtcagttttaaacaataaaggactgaacatacatttaaaaaaaaaaatgtggctgggtgcggtggttcacgcccgtaatcccagcactttgggaggccgagatgggcagatcacgaggtcaggagatcgagaccatcctggctaacatggtgaaaccccatctctactaaaaatacaaaaaaaaaaagaaaaaaaaaatcagccgggcgtggtggtgggtgcctgtggtcccagttactcgggaggctgaggcaggggaatgatgtgaacccgggaggtggaggttgcagtgagccaggatcacgccactgcactccagcctgggtgacagagtgagactccatctcaaaataaataaataaataaaataaataaatgcatgaaatgccaccacaaaaatatgcacatgagcattcacagaagcattatgcctaacagcaaaaagtgaaaacgaaccagtgtcctactgaatggatcgacacactgtggtctattcatgtaatggaacattattcggccatgaaaaagaatgaagaagccaggtatgctggctcatgcctgtagtcccagctactcaagtggctgaggcggggacattgcttgagccccccagggcccctccctggggtgtgggaggcaaagaagctgtggttgtctgtggctgtgtttgcttgcatattagtctgtctgctgggatatgagttaaagtccagcctaggcaacacagtgagacccaatcacaaaaaaataaatacatggccgggcgcaatggctcacgcctgtaatctcagcactttgggaggccaaggcgggcggatcacctgaggtcaggagttcgagaccagcctggccaacatggtgaaaccccatctctactaaaaatacaaacgttagccgggcacagtggcgcacacctgtaatcccagctactcaggaggctgaggcaggagaatcacttgaacccgggcagcagaggttgcagtgagccaagatggcaccactgcactccagcctgggagatagagactcaaaatgaataaatgaataaatatataaataaatataaatatatatattttacatatatatatatatattttttgaaacaaggtctaggtctgtcacctaggctagagtgcagtgatgcaatcacagctcactgcagccccgaactcctgggctcaagtgatcctcctgcctcagcctcctgagtagctgggactacaggcacctgccaccatgccaggctaatttttgggttttctgtagagacagggtcttgctgtgttgctcaggctgatcttgaactcctggcctcaagcgatcctcctgccttccaaagtactgggattacagttgtgagccaccaagcttggcataaaaaaaaatttttttttttttgagactgagtctctctctgtcacccacactggagagcagtggtgtgatcttggctcattgcagcctccgtctcctgggttcaggcaattctcctgcctcagcctcccgagtagctgggattacaggtgtctgccaccacgcccagctaatttttttgtatttagtagagatggggtttcaccgtgttggtcaggctggtctcgaactcctgacctcggcctcccaaagtgctgggattacaggcgtgatccactacactcggacttctttttttttttaggagatggagtctcgctctatcagccaggctggagtgcaggggcacgatcacagctcactgcagcctcaaccttttcagctcaagagattctcctgcctcagccccgcaaagtgctgggattacaggcataaggcaccaagactggctccaaaaggtccttttttgtgattcacggaataaattcaggaaggaggaaatgaaggggagagtcagggtggtcaggggataagaagagtctcaggtgggctgctgggttcagaggtgagcagaggagacgtcgtagggagggaggtgggtttgggggcacagtgaagatttgaggtggctgtaaaaggcagctagtggggcccggaagcccctgcccacccgcccacccccaactcacccacacagttcttgccgtcagggctgagctcgaagcctgcattgcagacacactggaagctgccctctgtgttgacacagcggcccaggtgacaaaggccaccactgacaatgcactcgtccacatctgcggggaaggcaggcgggcagtcaagaggtgctccccaccctccaagcctgggccagaacccccaacaacatcacccctactcttggatggacagccgtacccacgcatgcctgcctggtgggcgtggcctggaagcccgggtagcaccggcagtggtaggtgccggggatgttgacgcagtcaccgtggtggcaggggctgctggtgcattcgtctacatctgaggggagaggaccctgagccctagcacgagcagggcagtgagaaccgcccccccttccacctggccgcggctcaccaatgcactcgccgcgcacgtcctgggtgtagcccacgttacactcgcagcggtagctggaaggcgtgggcaggcagcggccattcagacacaggttggtgaagtgtcggcagatgtcaatggtctggttcagggtagcagtgcctacgggtggggccggcagaggcatctgagcagtggctggccccgccccagtctggagcctgggcttcacctctctaggcccagataccccctctaaggctgggaccctgccctggctcagatcctgccctctttctcatggagagtcctgccttagattcagaactccaacctgggatctagatccctccaacctgggacctagatccctccaacctgggcctggatccctccaacctggggcctggatccctccaacctgggcctggatccctccaacctggggtctagatacctccaacctggggcctggatccctccaacctgggacctggatccctccaacctgggcctggatccctccaacctggggcctggatccctccaacctgggcctggatccctccaacctggggtctagatacctccaacctggggcctggatccctccaacctggggcctggatccctccaacctgaagcctagatccctccaaactggcacctcgatcccttcaacctgggacctggatccctccaacctggggcctagatctctccaacctggtgcctagatccctccaacctggaacccagattcctccaacctggtgcctagatccctccaacctggaacccagattcctccaacctggggtctagatccctccaacctggggcctagatatctccaacctggggcttagatcccaccaacctgaagcctagatccctccaacctgggacctggatccctccaacctgggccctagatccctccaacctggggccttagatccctccaacctggggccttagatccctccaacctggagcctagatccctccaacctggagcctagatccctccaacctggggcctagatccctccaaaatggagccttagatcccttcaatctggagcctagatccctctaacctggtcccagagatgcccagactcccactctgggcccaaatcctcattatggggcaagaacccaccccaggcctaaatcctacatgacagacccccacaccaggcccaaactccccacccaaagcccgaactctgacttatttatttatttatttatttatttatttatttttagagacagggtctcactctgtcacccaggttggagggcagtgacacaatcacagctcactgcagcttccaactcctgggctccagcaatcctcctgcctcttcctcctgagtggcagggactactggtgggcatcaccacacctagctaattttcaatttgctgtagagacagggtcttgctatgtcacccaggctggtctcgaactcctggcctcaagtgatccttccacctcggcctcccaaagtactgggattataggcatgagtcgctgtgtccagcccaaaacctaactctgaggaccagattctccagttacctccatccccatccactactagcactgtcatccctactagccaggccaggagttccccctccaaagccctaaccctctctctgaggcctggacaccgtcccctgtttggagctctctccccagatccaggaccatccttcaagtcttggaatgttcctcccaagccccaggcctcaccaatattagagttgccagggcccaggctggggatcccacgcgcatcagagccatgggggttgagtcgcgctggcccaagagggggacccatgccattggatccgaagcccaggaggccagggaagaggccagggtggccgggtagcagcggcagccgctgggcgcacagttgctggaattcatctgcaaggaagcagggttgaggccaggcccttggccctcccctgtcccctcctcacccacagccctgcaggctgcagctcttactcactggagccccgaggaggacacagctcagggaccgggccagctgcccagcacctgcccctgtcacagcagcactgcctgcgagtgtagtggccggcgaggtctccagcacagcggcccccgaaaagcactgagaagcaggcgccggcccggtagtctgcaaaagatcagagggtgagcccatgagcacaggacatcagtgaccagacctggatccaaattccagctgtagcagcactgcctgtaggacgggtctgtttgccgctctgtgcctcagtttcctctccataaaatggggatgcttggagcatccacctcacccgggaaaagtattacctggatgaaaagtctgacatagtccagatgcagtagctcacacctgtaatcccagcactttgggaggctggggcgggaggatctcttaaggtcaggagtgcaagaccagcctgaccaacatggcgaaacctcatgtctactaaaaatacaaaaattagccaagggtggtggcaggcacttgtaatcacagctacttgggaggctgaggcaggagaatcactaattgcttgaacccaggagacaaagattgcagtgagctgagatcatgccactgcactccggcctgggcaacagagcgagactccgtctcaaaaaaaataaagggccgggcgcagtggctcacgcctgtaatctcagcactttgggaggctgaggcgggtagatcatgaggtcaggagttcaagaagagcctggccaacatgacgaaacccagtctctactaaaaatacaaaaattagccgggtgcggtggcgcacacctgtaatcccagctacttgggaggctgaggcaggagaatcacttcaacctgggaggcagaggttgtagtgagccaagattgtgccactgcactccagcctgggccacagaccaagattccgcctcaaaaataaataaataaataaatagaaaagtttgacatatggccaatgctcgctcagtgccatctcttgttaccaagattccaagttatcgcacagaggtagtgagctccccgtcgctgcaggcatccaaccacactaaggaagacccattggcggggaaggactaccccagtgggataccaggcagggacacggagatctgcagctgtgtgtctttgcttgctggcttcaggcattatgcagaagcctacgagactgtgaatttcagagaggggccccaaggagtcgaggggtggattgacggctacagcccccggggtgactgaggcagacaggctccccaggtatgagaaccaccaacactcttccacttcccactgcgccctcaaggtcaatggctttatgcagcgatcagatttctcaggctctggcttaaagagcatatttttaggcttaaaaatgcacaaaccttggctggtggcccacagtttaaaaaactcctcccagcagctgggagggccactgagagccacccctgacctgccccgagctgggaaaacatgcaaatgtttctacctccctggtcccctccccttgcacctgggggccccccaggtacgtgcgtgggagtcagggtttttcgttctcagccttatcatagcccctcaaaggggactgggcctgcccagacgaggagagatcaacagactcctccaaagtcacacagctgcaaaagcaagaggaggacgggaaactcgatttcccaatctcaggggacccaacaggcaacagtccctcaagcaagagagacagaatataagaatttcaacaaaaatgctcagccacagtggctcatgcctgtaatcccagcactttgggaggctgaggcgggtggatcacctgaggtcaagagtttgagaccagcctggccaacacagtgaaaccccgtctctactaaaaatgcaaaaattagccgggcatggtggtgggtgcctgtaatcccagctactggggaggctgaggcaggagaatcacttgaaccccggaggcggaggttgcagtgagccgagatcgtgccattgcactccagcctgggggacagagtaagaatgtgttaaaagaattttaacaaaaatgatcctgtcattgctgtaagtacatactgtgagctaagtggccacagccccaacattacctggtgtccatgaatgtgtattaagtatcctctaggtaccagccctctgcaaattactccccaaatgatatcttactcaatcttcattgagctaggtactgctattatctaccattttacagatggggaaactgaggcacagagcggttaagtcacttgcccaaggccacagggtctgtgagcagctctgggtgggagccccagactgattccaaagcctatgttcagaggctggtttgtccaatccaaggactggtctttagcagctgagagaggaccccccgcagtccaggggatgtatccacagctacccccaatgccagctgtgatggcccccagtggtggagacctagaaagtctggagttggccagccgggcgcggtggctcacgcctgtaatcccagcactttgggaggccgaggcgggcggatcacgaggtcaggagatcgagaccatcctggctaacacggtgaaaccccgtctctactaaaaaaatacaaaaaaattatccgggcgtggtagcgggcgcctgtagtcccagctactcgggaggctgaggcaggggaatggcgtgaacccaggaggcggagcttgcagtgagccgagatcgcgccactgcactccagcctgggcgacagagcgagactccgtctcaaaaaaaaaaaaaaaaaaaaaaattagctaggcgtggtggcgtgcgcctgtactcccagctacttgggaggctgaggcaggaggatctcttgaactgggaggcagaggttgcagtgagctgagatcacaccactgcactccagcctgggtaacagagtgagactctgtctcaaaaaaaaaaaaaaaaaaaagagagagacagacagctgaacaaggggtctctctcctacccactctctcccgctccagcccctcggttcactcaggcagtgggtgccatccaggctgctggcaaaaccttgggaacaggtgcacacgtagctcccgacagtgttggtgcagtcacccccagaacagaggccggacaggctgagacactcattcacatctacataaacagggacaaggtcagaactgggcacctcaccagcctgacccctctgccttcctgcaggggagcctgagccccccaggtcatgagtcacagaggaggtctcaggttgtccccctccagtcacccaccttcacatgcggcgctgctgtcactgagccggtgtccaactggacagcggcaatggaaggagcccaccatgttgacgcagctgcctccctggcacaggcctggcacagcctggcactcatccacatctgcaaggacaaagcccggcaggggagtgagaggcccatcggagggaagaaccaaggcagctaaggcctcccactcagccctgaccccactattcaccttggcaggcccccgtgtggatattggggatgaagccgcggcggcaggggtgtggctgtgcagggcaaagttcacatggaaggccccaggcacggcccacagtggcacagcaaagtgccttggtgcacacgaggcccgtcagctgatgctggcacccctcggggcctacttggccaaagcagggtcccgtccggtaatctgcagggcagacagatgtgggtacctggctgagggctgcccctgtctggagatctctgcgtctctaacaccttctcagcggcccctgcacccacagaccaggctttacttatgctgctcccttactaaatagaatatctttcctcccctttccctacctaacgaactcctattcacccttcaaaaccctttttcttcaaagcatttcctgaccaacttccaagagaccagcacctccaagccaataaagctcagggcctgtgtgaacaccctgtctgaactgatgggactccttccccaggcctatcctcccttcaggcctgggcagggacccacggatgcccagctaaaaagcatgtctagtccttgagcacacgcctggccctgccatatcgcccagatttggggaaggatctgttatctgcctaaattctctggacccccaacatcacatccccaatccccatcaggcccagcccaaggtgaccgcattggttcccccaaccccagtacatgagcccagatgtgacttcttggctctcttctcccagatgtttccaataaaggagttagctctcaaacaagggcagccgctcccaagagaagaagccaaactcacccccaactcaggccccgtaaggaggaggggcttcacagagacccccaccccccagctgtcctgatgccccaagccaaaacgtaattcctggcagctcccccactccccctccccctcactcttctgccacccagagcttggcccgcctccaacaagcccatgttctaattctgcagtttccagaagcccaccctcaaacccaggtcacttccccagcccctccagcttctagtccccgggtcgtgcccatcctcaccttcctgggctgaaacaccacattaggcacccagatgcctctgcatctgaaaatctcacaagcctggatgtccctgacgccacccactccggttctctttctctttctcagcctcctgtgggctcggttttttctgtccaggcttaaatgcccaggtggctgtctctgctggcccttccttctctcacggggatcctcagcggcaccctgggcttcagtccccatggatggggcagcccacgccgccatctcagccccaggcctgagtgtccagctgcttcccagacaacttgcaagtccctcggccaacactgagctcagagtcctcctcctccctgccagggtgcgccactaccttccctccagttttcaccaggtcttgggttcatcctgactccctccttcttctctccccgtccctgccacacctcactgctcacaagaaagacatcactgtgtccgttctccttttttcttttcttttctttttttttttttttttgagacagggtttcgctctgtcttccaggctggagtacagtggtgcgatcttggctcactgcctcccaggttcaaaaaattctcatgcctcagccttccaagtagctgggactacaggcacgcgctaccacacccagttacatttttttgtgtatttttagtagagatggcttttgccatgttggccatggctggtctcaaactcctggcctcgagtgatctgcccgcctcggcctcccaaaatgctagaattgcaggcatgagccacagtgcctggcctcttttctttctttctttctttctttcttttttttttttaagagacagagggtctggttctgtcacccaggctggaatgcagtggcaccaccacggctcactgcagccttgaactcctgggctcatgcaatcctcccacttcagcctgagactacagatatgcaccaccatgccaggctaattttttactttttttagagagggggggtgtctcactatgctacccaggttgatctcaaactcctggtacatccaccctcttaattttggtaacaacctctcagcaggtgaccccacctatcttagccgtcttaaaaatgggatcatttttaagagttagggtgactgggtgtggtggctcattttgggaggctgagacaggcagatcacttgaggccaggagttcgaggccagcctggccaacatggcaaaacctcatctctactaaaattacaaaaattagctgagcgtggggatgcctgtaatcccagctactcgggaggctgaagcgggaggattggttgaacctgggaggcagaggttgcagtgagccgagatcatatcactgcactctagcccgaaagagcaaaactttgtctcaaaaaaaaaagagagaattagggtgcaataaagagggggtttgcccatctcatgaagtccagtccaccctaccagatccagctgaggggtcccctcctccaggaagccctccctgactcccttccatggagcagatggtttctctgtccttcacatgctccagggctgccccaacccttgtcttagccttgacacccccagataagaatcttctgcttgcagtttcttctccctgcccctcagactggcacatcctctctctttcctaccagactccaacacaggtgctcgctcagagccagtgaatagcagatgttttggagaacagatgagcaaatgaaagaaatgtcctcagactgccccaaatgcgggaaggaggccagctggttcctttcaaggcctggccatgtctcagggacttccaggaaaccccctttcctccatcgagtcccctgtctacctcccacccgcgcatgcttggtacctctctcacattgaggtcccatgaagccatacacacaggcgcagcggttgggcccaatgcagcgacccccattgtggcagccgcggtcacagatggctgtggaggagagagggtgatggctggaggtcccccagcagcagagagagctggggttcacagcaagcctgtcttcacccaggaatccccaggatctggcccaggttgaataagactgaggctgagctgagtggctagcgcctgtaatccgagcgctttgggaggccaaggcaggtggatcacctgaggtcaggggttcgagaccagcctgtccaatatagtgaaaccccatctttactaaaaatacaaaaattagccaggcatggtggccggctcttttaatcccagctactcaggaggctgacacagaagaattgttcaaacctgggaggcggaggttgcagtgagctgagatggtgccactgcattccagcctgggcaacagagcaaaactccatctcaaaaaaaaaaaaaaaaaaaaaaaagggccgggcacggtagctcacgcctgtaatcccagcactttgggaggctgaggcgggcggatcacgaggtcaggagatcaagaccatcctggctaacacagtgaaaccccatctctactaaaaatacaaaaaaattagtcaggcaaggtggcgggcacctgtagtcccagctactcgggaggctgaggcaggagaatggcgtgaacctgggaggcggagcttgcagtaagccgagatcttgccactgcactccagcctgagtgacacagcgagactctgtctcaaaaaaaaaaaaaaaaaaaagagactgtggcaataaacgtcccctgcaatctccagtccaggaagaaggaaccctgggcagtgggcaggtggcagcagagactaatactctgggatcacagtcccaggtgtgcaaagaggggagtcccatggggatactcacgctgcccacacacggtgcctgtgtagcccttctgacacagacaggacgccccccggcaggtgcccccattcatacagctcacactgcaccctgaccctggggacaggaaggcaggacgcatagtaatgtggagatgggccccgagatgccctcctaggaaggctgcaggactaggcatgctcagccccgctcctgtccttcaacaaaagcagcccaggctcctcgtggcaaccagaaccctgtgaacttcttctccctcccgcaagaggccgcttcccgctcacctcggctcaccccgcagctgggagccagcgtcccatccgcacaggtgcacaggttgggctgggagcagaagccttcaccgcaggcgcgcctacagatggctggatgagtgcagcgggtggcagtcaagaccaggaccgagcctgggccgtccctgctccattggtgtccgggctggccggaacacctcagtggacgctgctggtcatctgcatccccggctctgctcatagcacaccccacccctgttttcatgggatgtccccccactctcgggctgggctgggcagggtgtgtgacccaggctgtgggttggggactctgctagagccatggggagagaatgctctttgggccagagctgctgagctgtgaggacagagctggaggtgctggggtcctggatactgaggttgggtgtctcctgggaagtggagtcagattccagagacagaaacagaaagagagggtgaggccagagagagacaaacagagagagactcagagaaacagagagagagagaatcagttagatagagagacagtaaccaacagagagaggccaggtgcagtggctcacacctggaatcctagcactttgggaggctgagatgggaaaatcgcttgaggccagagtttgagaccagcctgagcaacacagagacccccatctctaaaaataataataataaagaaaagaaaccaacagagagagacatgagcagagatgaatagagagaggcagagacaaagcaagggaaccagagagacagacagacacaaggaggttgtagggcaaaggaaatgaacatggcaggttggcctggaaccctgaggacagacgcagatgcaagggccattcctgtggttcagccagaggtccctggctaagtccccgtgtaaacagagctgaacctgcaggcaggtaagagtgtccccggcctgtgcccccccacctccagacggcggtagcactcacgtacgacacactggctcctgccagggaatgtcctccagcctggacagcagtaggcatggaaccgggagccgcacacattcggccttcggggacagcgagatgggtctggtgagcccctgcccgtgtggacatccccccgggtattccgctggccccaggacagcccaatccacaccgaaggggtctcccagcatcccaggtaccacgcacccctgcaagatgcctgggctgccccgcctccgcacacgtccaggacctgcagcctccaaggccccgtcccagcggccttggccacctgccatgcacaacagggccgaccaggccagcaggagccgggccagggggccccttgccaaatacagaccctccagagtcatggcgtgtcccctggaggctgcggagaggaagcagagtcagccctagatgagccccccaccctagccatgggggacccaacacaacgaggagggcagggtggttgccaaatggggcagccccggggcctctgggagcccaaggaggcatccagccccaaccgggaagcggtgaacagtcagaggaggcttcctggaggaggtgtgatgttagagaagggtcttggggctgagggtgcacagccaaggcaagacgggagtgggaagtggaagggaggggagagagggccaggtggggccaggtggggccaggcgttgcaggagtgggcatagcagtgtcatgcagcttttgctcattcgtcaaggacaatgaagagcccttgaaaagctttgagtgggaggagcaaggtcagaaatgcatgttaggtggtgtggggaagggcagcagggtcccgggggggaaacagggtgtcagaaggctgggggctgtccagatgggagagagaggagaggaatgggaggctcatgtcgtgggaggtggagggcattgaggagattcccaaagttctagctgggacggtggagcccagagagcgtccagggtaggaggaagatggtaagtcgtggaaggcaacaaccccactgtccctctgtgacacagatacccccactcctgcaatgcctggccccacctggccctgtgtcccctcgcctccacatcccacgccggtcttgcctgggctgtgcacccttagccgcaagacccttttctaacatcacacctcctccaggaagcctcctctgactgttcactgctcccaggtcagggctggatgcctccctgggcagggggcccaggcaggggctggaacttcccaatgcagagagtaaccctgtgcccagcagggaagggaccgcttctgtgcccatttcacagatgcacaaactaaggccatcacaccatgagtgaggggctaagccggagcttaagcccacgaagagaagaaggaggggaagaagatcaggaacggaactcgctcctgccccccttggctgggtctttcctgggccatgaaggacgggagggagaagaccgggacaggagacgaccgtttggagggtggaggcaaaatacttgagggagagaagccagaccaagtggccttcctgttccattcaggttccagggaggaaaggaaccggccctaggtggagaatgggcggggagccctgctgtgtggtcttggccacgcccctctctgggccaacctggttgtccaaaggccccggagaagggagagacccctgtcaacgttggagggttggctggctggagaggggcgccctctttttcttctcagttgtccgggtcagtccgcactctgaggctccgtggactccaagcagcctcggggcttgcaagccctcctcccccactccctccgccccagccccctgcctcgggtcgggtgggggaattaggtggggggagtctctggcctgatttgcctcggtcccccctacacaccgctgcttctgcgagccacaccctggagtttgtggaatgaatgagcagagaaggcgcgcccggcacggggtgtggaggctgagggccaaacagcgagggataccaagcttcgccgacggggagggggcgcccccggagcccgcggggcgcgatctccacccggcagggcccccggccgcgaccacgcttggctccgccctcacctgtggggtcaggggccccgcgccccggccgagcccctcccgccgggtccccgcgcccccactccccactgcggcgggcgccactagaaggcggagaggggagggggctgggcccggggctgcccggctgcgaacaaaggaatcctctccccctccccctgccggcccccccgcccccgccttctccacccttcagcgcccgcgatctcgccccgccgctggccccgcgccttcacctacctgcgaggcggcgcgcgtggaggcgggcacggcaggcggacgcgcgggactcagcgctgcagggcgggctcctgcggcgccggggacccggggcgggaacgcaaagccgagaggccgaccccgccgcgttcccagcccagagctgccactcgggggggagttgggggcgggaggagttggaggagggcgcgtttgcacctcttagctcccggggcggggacggggggctccgatccggggcggggagagaggctgcggctcgggggagggtccggggctccgagtgaaaaactccgatggactggagggatgtgagggcgggctgggggcgcctagtaggggctgccggggccgcgttttcggatcgagactaaggtggaggtggggctctgacttttggagggcctggacgacagcctgggcagagaagtcccgggactcacctgggcggccctctcagggcctcccaagccgccaccccctccctcgagcaaggagaattgcgagagtgacgttggaaactcacctggctcttggagcctggattcttaactaggctgagatcaggggcccctaaatatgttgacaaaacattgggcaaagctgtatttcccagggagaagggcccaggtttttcatctggttctcaaaatgaagaggttaacaattcaaacggtgtaaactttcaaatctctttgaacctgtttgtccacctaccaaagggaccagacaagaattttggctccctatctgttgtcagtactccaaacaaaaatttctaggcttttccactaccttcatacctttgagaatagacccttaacatggggatctgtcagaagctgtgcgttgggcctgaagctgttactccatccagcaaactcctacgcatctgtcaaagtccagttcaaaaattccctccctatccgcaaattgtgagtttactctattgaactcccaaagctgattgtgctgaatatccccccaccacagtacttccggaatctaataaataagtaagcccagtgggcttgaaaccaggagttcgagactaacctgggtaacatagtgagaccccatctctaaaaaaaaaaaaaaaaaaaaaattaaaaagaattagccaggcctggtggcatgcatctatagtcccagctactcaggaggctgaggcaggaggactgcttcagcctaggaggttgaggctgcagtgagttatgattgtgccactgcactccagcctgggcaactgagcaagaccctatctccaaaaattggagaccctgtctccattccggaagtgctatggtgggagtatattcagcaagtcagctttgggagttcaatagggtaaactcacaatttgcagggagggagaggattttgtttatgttttgttttgtttgttttttgagacaaagtcttgccctgtcacccaggctggagtgcaatggcacgatcttggctcactacaacctccacctcccaggttcaagcaattctcctgcttcagccttccgagtagctgggattacgggcttgtgccatcatgcccggtaaattttttgtatctttagtagagacggggattcaccatgttggccaggctggtctcgaactcctaacatcgtgatccacctgcctcggcctcccaaagtgctgagattacaggcgtgagccaccgagtctggcccagaaggggatttttgaagtaggttttgacagttgcataggagtttgctggaggaaacagaacaggcaaaggcctggagaaggagagaacttagaacaaacatgcctggatggagtgaggttggaactttaggagagaggagaaggggagggagcaagaggaaagcaggaaacataagaagaggctagaagcaccgaggagccctcagcaggctccccccccacctctgaggggagacacggtggactcacagaaaggggaggttctcccaaggctccacttccaggtcttagactgtgtccggggagcattgagggccccagggctgggctcggggagcatgggacagacgccgacttcagggacaagatccagtcatcctggccaagggaggggcccgtggaccctgtgagaagggtcaggtggggtgctggggcatggggagggtggactggggagggaaccccaggatggaggtggcccagcagagacaggggggtggggttcctgttggagggtgggcccaggggctattgtggacaaaccagtttccccggccaccttggacacctctttccaggctcctctgccaaggtccacccagatttgttctgcaacaaatgaatcttacatgggcacggggacaagcaccgggtgccctagaagcagcccagcataggtgcaaaaggtggggagagattgtcccatcccagggacactgcacagccactgttgccatggctaagtctggaggagggctttcctggaagaactgtgggccagggagcgactcagtcctagaagtctccctacctgccctccagaagagaggggagaaggaagccggagggtgtggcaagaccaggatgtggagctgttggaagtcaccgcaactgaagtgctcgaaaacggcagatagtgggcattggttgttcacagcccccaacccaagctactgtccacaccgcgtgctgtagtttcagacttcccatggtgccaccctggtctgttatgttattgccagttattgatgtggtatcacagacagtgtcaccccccactgtacccttattacatcacactgttaagaagggacatttaggctgggcatggtggctcacgcctgtaatcccaacgctttgggaggccgagttgggcatatcacgaggtcaggagatcaagaccatcctggctaacacagtgaaaccccatctctactaaaaatataaaaaattgctgggcgcggtgggtcacacctgtaatcccagcactttgggaggctgaggcgggcggatcacgagctcaggagatcaaaaccatcctggctaacatggtgaaaccccgtctctactaaaaatacaaaaaattagctgggcatggtggtgggcgcctgcagttccagctactcgggaggctgaggcaggagaatggtgtgaacccgggaggcagagcttgcagtgagccgagatggtgccactgcactccagtatgggcgacagagcgagactccatctcaaaaaaaaaataaataaaataaaaataaataaaaaaattagccaggcacgggggcacacacctgtagttccaggtacttgggaggctgaggcaggagaatcgcttgaacctgggaggcagaggctgcaatgagccaagatcacgccactgcgctctagcctaggcgacagagcgagactccatctcaaaaaaaaaaaaagaagggacatttaggctttaaatcctaccgcatatcacagtccccccacccaggactgtacaaaacacatgcatggtctctccgtcaaaactgcatcatcagccaggcgctgtgcctcacgcctgtaatgtcaacactttgggaagccaaggtggaggatcctttgaggccaagagttcaaggcaagcctgggcaacatagcaagaccccatctctacaaaaaaatagaaaaattagctgggcatggtggcatgtacctgtagtcccagctacttgggaggctgaggtgggaggagtgcttgaacccaggagtttgaggctgcagtgagctatgatgttgccactggactccagcctggataacagatcatgaacctgtctctaaatatgtatgtatatcatcatcatcaccatgttcctattctacagtcacttgtccctatgaccctgtctcattgtcacctgtccatgtgacaccctgctcttttctggttgctccgctacctgggacatgcatgtctcctgtcacctttacaccttcacctttctgctgtgacacagtccccggctcatggtcataccattacccagaatgtcagggttcttaacatcacaattcactggcatcagcaacaaccgggctcagcagaaagagtgaccaagcgtggtggtgccgcagccaaccacattcacacacatcacatgcagatcgggccccaggaagacaccattcattaccatctggcaccctaagccctgatgctgctcagtgatccgagatgctggcaccagttccccccaccctcagtaaaatgaggtccatgggggctccaatggggatctggtgttttaaagtttttgtttttgtttttttgacagaatcttgctctgtcgcccaggctggagtgcagtggtgcaatctcagctcactgcaaccgcctcccaggttcaagccattctcctgcctcagcctcccaagtagctgggactacaggcacacatcaccatctagttttttttttttctttttctttttcctttttttttttttttttttttttttagatggagtcttgctctgtctcccaggctggagtgcagtggtgccatctcggctcactgcaacctccacctcccagtttaagtgattctcctgttttagcctcctgagtagctgggattacaggtgcctgccaccacgtctggctaattttgtatttttagtagagatggggtttcaccacattggccagtctggtcttgaactccagacctcaggtgatccacctgcctcggtcccaaactgtggggattacaagtgtgagccaccgcgcctgacccctagtggatgttctctttttttggtttttgtcctccccggaccgcccccgccccgagatgcagtcttgctctgtcacccaggctggagtgcagtggtgggatcttggctcactgcaacctcctcctcctgggttcaaggaattctcctgcctcagcctcctaagtagctgggattacaggcgtgtgccaccacacccggctatttttttttttttttttttgtatttttagtagagatggggtttcaccatgttggtcaggctggtctcgaattcctgacctcatgatatgtccgccttggcctcccaaagtgctgggattacaggtgtgagccactgcacctggcccctagtgggttttaaaattacagtgtcacctgttgctgtcacctgttgccttcccatcattcccagttcctgtgacgttgtcacctgttgctgtcacattgtcacactattaatgtcccccagaactgtccccccccgctgctgccactgtcatcccgttaaggtcactgtgagtcacgccagccccaccctccgtttgactttctgagcagccatggagccccccctcataggcgggacttgactgtgtgcacccagagccagcagaccccagatgttcattagcatgagctcgaggaaggcatggagacaggagtgggcagggtgtgcccaggagcacagggtcaaggctggggacaaggagatgggaggagggacggggagatgcctgcagtctatggtgtgtggagtgcgctgggccagcctaggccagggtggcttggggacagagccctctttgtataagcacaggaagcagctgggagtcaaagcattgcatacaacgccaggagtttggccacgtgcccaggaatgaggcttggagcggggagggaagccgcagaggacccaggaaagctctgaggaagagatcaagctggatcctcacaagagaccctgaagacaggctctgatatcatcccattacacagatgaggaaactgaggcacagagccaccacatcgcccactgggaccccaccaccaggaaagaatacaggcaaatctgaacccaggccacaaagctggaaccttccccgtggccttgggcccccagccacaccctcaccccattgccttgatgttctagctgggggacctgtctagggtccatatacaatatattatttctctttctaataaacacacatgtttgcacctttatacattgttctgtatttgccctatttcctctttgtaaaaataattaaaaacaaacaaacaaacaaaaaaacagggtctccctctgtcacccaggctaaagtgcagtggggaagataacagctcactgcagcctcgaattgggcttaagcaatcctcccacctcagcctccagagtagctaggactacaggcacatactacctgtctaatttaaaaaaatttttttttttagagatagagtctcactatgttgcccaggctggtctcgaactctgggatcaagtgatcctcccaactcatcctcccaaagtgctgagattacaggcatgagccgtcacacctggcctctttctctttctttctttctttctttctttctttctttctttttttttctttttttgttcagacagagtctcgctctgtcgcccaggctggagtgcagtggtacactctcagctcactgcaacctccacctcccaagtttaagcgattctcctgcctcagcctcctgagtagctgggagtacaggcgcccaccccacaccctaatttttgtagttttagtagagacggggtttcaccatattggccaggctggtctcgaactcctgaccatgtgatctgcccgcctccgcctcccaaagtgctgggattacaggcgtgagccacggtgcctggcctctttctctttctaataaacacaaatgttagcacctttgtatcttgttctgtatttgctttttctcatctttgtaaaaaaaatatatttttttcttgcaaactaaatcaatccctctcaattaccatcttctttttactgttttcttttactgagatcaatttcacacaacatagcacttactatgttcaagtgtacaattcagtagcgttcagtacacgcagtatgtgcagccaccccctctatctagttccaaaacgtactcatcaccccagaatgaaatcctgtccccattagcagttgctccccattccccataccccagtccctggcaaacactaatccactttctattctctgtggatttgcctgttccggacattgcacgtatttattttattttattttattttattttattttattttattttattttgagatgaagtctccctctgtcacccaggctggagtgcggtagtatgatcttggcttactgcaacctccacctcccaggttcgaatgtttccctgcctcagccttccgagtagcagggattacaggtgcacacggcaccgcgtctggctattttttttttttttggtatttttagtagaaacgggatttcatcatgttagccaggctggtcttgaactcttggcctcaagtgatccatctgccttgacctcccaaagtgctgggattacaggcatgagccaccgtgcctggcctagacgtttcacgtaaatggaatcacacactaggtggccctttattttattttacttttttttttttttttttttgtgacagagtttctctctgtcacccaggctgcagtgcagtggcgcgatctcggctcactgcaacttccgcctcccctgttcaagcagttcccctgcctcagcctcccaagtagctgggactacaggcacacgccaccacacctggcaattttttttttttttttttgtattttaatagagacggggtttcaccatgttggccaagatggtctctatctcctgacctcatgatctgcctgcctcggtctccgaaagtggtgggatcacaggcgtgagccaccacgcccagcctcttttaacttcttattacatcttggcaatatttccatgtcgagccgggagcgggggatcacacctgtaatcccagcactttgggaggccaaggcaggcagatcccttgagtgcaagagttagagaccagctggggcaacatggcaagctccgtctctacaaacaacacaaagattagccaggcctggtggcatgagtctgtagtcccagctactcaggagactgagatgagatcacttgagccccagatgtctgggagccccagatgtcactgtagaggctacagtgatccgagatcacatcactgcactccggactgggagacagagcaagaccctttcaaataaaaagaaagacagagagatagagaaagagagagaagaaaaaggaagaaagaggagaggagagaagatgcgcagtggctcacgtctgtaatcccagcactttgggaggctgaggcaggtggatcatgaggtcaggagttcaagaccagcctggccaagatggtgaaaccccatctctactaaaaatacaaaaaaaattagccaggcgtggtggtgggcacctgtaatcccagttacttgggaggctgaagaagagaattgcttgaacccgggaggcggaggttgcagtgagcagagatcatgccactgcactccagcctgggcgacagagtgagactctgtcaaaagaatggagaaagagagagagagagaggagaaagagaggaaggaaggaaggaaggaaggaaggaaggaaggaaggaaggaaggaaggaaggaaggaaggaaagaagggagggagggagggagggaaagaaagcaagagaggccgggatgcagtggctcaagcctgtaatcccagcattttgagatgccaaggtgggctttgaggtcagacttcaactggattaggattagccctgctgggagaagagaggactctggcacccactgccagttctgccatctgcacccatttatctggggccccaatgcccgcccagcctctctccctctggtctcatccttgcgggctaagggtgcacttgcagctttccactctgccctctgaaaccttaagggtgccattagttaagtcagacaagaagactgacactcaaaaataaagttggttaagtgcaaattgtcagacccagaaacctgaatatcactgatcttcagaaaacgcacatgtgccagggccttcattggcactcaataaacgctgaatcgatggatcagtaaatgaatgaatggtgagcaaatctgatatgaccggaaggaaggagtggaagttgcttgtggagagacgagcaggactcagattgaaaggagtcttgaaaaccaggagcgtggacatgacctggcggcagcagggagccacggtgggttctaggcagggagcgacgccatctgatttacctttgaggacctcattgccaagaggaagttaatcaaatctgtcactagggggcactcaagtcttcccatagattgttaggtggccactggtcacagggagcttttgagcatttgaaccagttctatggagatataagtgtgaaatccacacggaatcgcaagcacttcatacaagagaaagaatgtaagatgcctcaaatagcaatgacaggggtgaaatgctgatattttgggtacactggactaagtaaattatattattaaaatttcatctgtttctttttactttttaaaatgtgggttctaggccactcggtggcttacgcctgtaatcccagcactttgggaggcccaggtgggcggatcatgaggttaggagtttgaaaccagcctggccaacatggtgaaaccccatctctactaaaaatacaaaaaattagctgggcatagtggcagggacctgaaatcccagctattcgggaggctgaggcaggagaatcgcttgaaactgggaggcggaggttgcagtgaactaagatcgtaccactgcactccagcctaggcaacagagtgagactccgtctcaaaaatatatatataaataagtaaatatatatgaaataaaatgtgggttctaaaagagttaagattgtctatgtcggttgcattagtttttattttatttcttttttattaggcaagatcacgttctgttgcccaggctggaatgcagtggtgtgatcatggctcactacagcctcaacctcccaggctcaagcaatcctcctacctcagcctcccgagtaggtgggattacaagtgccgccaccacacccggctaacttttgtatgttttgtaaacacaaggtttcatcatgttgtcccagctgatctcaaactcctgggcccaagcgatcctcctgcctcagcctcccaaagtgctaggattatggacatgagtcactgagcctgaccttgcatttatatttctattggacagcactgatttagaaaaagaagttactatttttttcaacagtcatcaggggttgaactaccctctctttttctcttatttcctcttactttggtcattcttcaagttaacaatctaccaggttgttctctttgttcattaaacgaaggtagatattcataaatacatagaccaaaaagagaggatggggtcattgtttcataaatatggaatcatattgaacatacttttttattcacaggactttctggaaacttcttagaccacctactaaaatctgaattcattctttttaattgcttgataatcatctatggtgtggatgaaccttcatttattcaaccacatccccactgatgagttttcacttggttaacaggttttattccccaccactaccaaaaagtaagcaaaaaatgctgcaacaagaattttttggctgggtgcagtggctctcacctgtaatcccagcactttcggaggccaaaggcaggaggatcgcttcagaccagttcaagactagcctggacaatgtaatgagactcctgtctttacaaaaaaatttttaaaaactagccgaacatgatggcatctgtagtcccaactacttggaagtctgaggtgagagaatcacttgagcctgggaggttgaggctgcagtgagccatgatcacgccactgcactccagcctgggcattagagcgaggccctgtctctacaaaaattaatttttatacctatgcccatacgtgctgacgattttctttccaagggaaagatttctagcaatgaggttgctgggtgaaggatctctctctctctctctctttctctctctctctctctctctctctctctctctctatatatatatatatatatatatatatatatatatttttttttttttttttttttttttttgagaccgagtctcgctctgtcaccaggctggagtgcagtggtgcaatattggctcactgcaacctcctcctcccaggttcaagcagttctctgcctcagcctcccgagtagctgggactacaggcgcgtggcaccacgcccagctaatttttgtatttttagtggagatggggtttcatcatgttggccaagatgatcttgctctcttgacctcgtgatctgcctgcctcagcctcccaaagtgctgggattacaggcgtgagccaccgtgcccggcctatatttttaattttaatagatgttgccaggttgtagatattgacaaactgatcctaaaattgatacagaaagacaaagactgagaatagcctacaaaatatcaaagaagaaccaagttggaggactgtcactacccaatatcaagacgttctggaaatctgcaataaccaagacagtattggcaaaagaagacacacagatcaacagaacagaaagtccagaaataaatccacaccaatataatcaattgatctttgacaaaagctcacaggcaattcaacggagaaaggacagtctttttgctgtctatgcaatcaatgtgttccctgcccaatgcacatacaggccaatacatggcaccagcttttcagaaaataaaagctttattgcaagtcgactgcacggagacaggaagaaacattcaaatctgtctccgggagctgcaggctggggcagcttttataagcatagggtaatgaggcgtgttctgattggatcttgcactgaggtgatgccgggaggcatgatctgattggatccggccatgggatgatgtcagggctcactctgattggatcctgggtcctgtcatgcagtgtctgcttcttaattcagtctccacccctctctcctcagtgggagcacttaggttctgcctgtggttacacagttggttcacctggacatgctcaggttatgcgaccttctacctgggggtccgtggcaactgaaaaacaactcacaactctgctacataaaagttgaactgaccgggcgtggtggctcacgcctgtaattccagcactttgggaggctgaggcgggcggatcacctgaggtcgggagtgcaagaccagcctgaccaacatggagaaactccgtctctactaaaactacaaaattagccgggcgtggtggcacatgcctataatcccagcaactagggaggttgaggcaggagaatcgcttgaacctgggaggcggaggttgtggtgagccgagatcctgccattgcactccagcctgggcaacaagagtgaaactccttcttgaaaaaaaataaaaaataaaaagttgaaccattgggaccgggcgcggtggctcacacctgtaatcccagcacattgggagtccgaggcgggcagatcacgaggtcaggagatcgagactagccgagaccatcctggctaacatggtgaaaccccgtctctactaaaaatacaaaaacaaaattagccgggtgtggtggcgggcacctgtagtcccagctactccagaggctgaggcaggagaatggcgtgaacccgggaggcggagcttgcagtgagctgagatcacgccactgcacttcatcctgggtgacagagcgagactccaaaaaaaaaaaaaaattgaaccattgggaggccgaggcgggcggatcacctgaggtcaggagtttgagaccagcctggccaatatagtgaaaccccatctctactaaaaatacaaaaattagccaggtgtggtggtgctcacctgtaatcccagctactcaggaggctgagacaggaggatcacttgaactcaggaagcagaggctgctgtgagctgagactgcgccactagactccagcctgggcgacagagtgagactctgtcttcaagaaaaaaaaaaaggtgaaccagattggtctggtgtggttacattttccacagatggtgctagaacaatcagatgtccatacgcaaaaaataggcacagactttacacctttcgtaaaaaatgaatgcagccaggtgcagtggctcacgcctgtaatcccagcacttttgggggctgaaacaggagaattgcttgagcccaagagttcgagaccggccttgaacaagtgagaacccctctctacaaaaaattttaaaactttttaaaaatctaaaaacaaaacaaaacaaaaatgaacacagaccaggcacagtggctcacacctgtaatcccagcactttagaaggccaagatgggtagatcacctgaggtcaggggttcaagaccagcttggccaagatggtgaaaccccgtctctactaaaaatacaaaaattagccaggagtggtagtgggcacctgtaatcccagctacttgggaggctgaggcaggagaatcacttgaacctgggaggtgggggttgcagtgagtcaagatcgagccactgtactccaacctgggtgacagagtgagactcaaaaaaaacaaaaaaatgaacacaaaagggaccatagtgaggtacctagaattggaaaattcacagagacagaaagtagaatggaggttaccaggggctgggggaagagggatggagtgttattattatcataattattattattttgagacagtgtctcactctgtcaccaggctgtagtgcagtggcatgatcttggttcacttcaacctccgcctcccaggttcaagagattctcctgcctcagcctcctgagtagctgggactacaggcatgcgctaccacgcccggctaatttttttgtatttttagtagagacggggtttcaccatgttggccaggatggtctcgatctcttgacctcgtgatccacccgcctcggcctcccaaagtgctgggattacaggtgtgagccacagcacccggccagtgctattatttaataggtacagatttcccgtttggaaaaagttctggagatgaatggtgaagatattatgggaaagggctcccagttcagactccaagagagggttcttagatctcgcacaagaaagaattcaggacaagtccataaagtgaaagcaagtttattagaaaagtaaaggaataaaagaatggctattccatagacagagcagccccgaggcctgctggttgcccatttttatggttatttcttgatgatatgctaaacaaggggtggattattcatgcctcccctttttagagcatagagggtagcttcctgatgctgccacggcatctgtaaaccgtcatggcactggtgagagtgcagcagtgaggacaaccagaggccactcatgtcgtcatcttggtcttggtgggtttcagctggcttctttattgcaatctgttttatcagcaaggtctttataacctgtatcttgtgctgacctcctgtctcatcctgtgacttagaatgacttaaccacctgggaattcagcccagtaggtctcaggctgattttacccagcccttattcaagacggagtcgctctggtttacatacttctgacagtgatggttgcaaaacaacgcgaatgtacttaataccactgagttgcatacttaaaaatggtttgagaactaagctccgatattttttatcttgcccagattcctatctaaggggcctgccccacaaaccataaatcctcatcagatgggttttatttaatcctatatatcgtcacttactttccaacctgactctgccataacattatgtggcaaagaagaaaataaaagtattttaccccaaaacatgtttctttaccatattttgaaatggccttgggccaggtgtggtcgctcacgcctgtaatcccagcactttgggaggcggaggcaggcagatcacctgaggtcaggagttcgagactagcctgaccaacacggagaaaccccatctctactaaaaatacaaaattagtctggcatggtggcccattcctctaatcccagctactcaggaggctgaggcaggagaattgcttgaacccgggaggccgaggttgcagtgagccaatatcgtgccattgcactccaacctgggcaacaagagcgaaactctgtctcaaaacaaacaaacaaaccttggtctccataatcttttatctgaacctgaacatttcctttctattaatcccaggtctttattttgtttgtttgtttatttatttatttatttatttagagacagagtctcactctgttgcctagcctagagcacagtgacatgatctcgactcgctgaaacctccatctcccgggttcaagagattttcctgcctcagcctccagagtagctgggattataggcacctgccaccatgcccggctaatttttttgtatttttgatagaaacagggtttcatcatgttggtcaggctggactccaactcctgacctcaagtgatccacccacttcagcctccagaagtgctgggattacagaggtgagccaccatgcccagcttaatcccaggcctttagacaaactcaaccaattgtccaccagaaaatgttcaaatttacctatagcctggaagacccgccacctcctttgaattgtcccacctttctgtaccaaaccagcgtatttctcagatgtgtttgattgatgtctcttgcctccctaaaatgtatcaaaccaagctgctcccgaaccaccttgggcatatgttcccaggacctcctgagagctatgtcatgggctatgatcactcatatttgcctcagaataaatctcttcgaatattttaaagtttgactctttgcgttgacaggttaaaatggtaaattgtggctgggcgcggtggctcatgcctataatcccagcactttgggaggccaaggcggtcggatgacttgaggtcaggaattcgagactacccttgccaacatggccaaacaccatctctaccaaaaatacaaaaattaactgggcgtggtggcgcccgcacctgtattcccagctattcgggaggctgaggcaggagaatcgcttgaacccaggaggcggaggttgcagtgagccgagattgcaccactgcactccagcctgggcgacagagcaagactctgtctcaaaaaaaaaaaaaaaaaaaaaaagggtaaattgtatgccatatatattataccatgcaaacaaacacaaagaattgtagacctatatgtcaaatacaaagctataggtgatggtgcaagaggaaggtggagaatggaagggagagaaaacaaaaataaggaaggaaggaaggaaggaaagaaaggaagggaggaagggaggaagagagggaaggagggagggagggagggggagggggaggaggggagggggagagggaaggagggaggagggaggaggagggaggaggaagggaaggagaaaaaactctacaaaactctacaacttctagaagaaaatctaggtgatcttggccgggcgcagtggctcacgcctgtaatcccagcactttgggaggccaaggcgggaggatcacgaggtcaggagatcgagaccatcctggctaacacggtgaaaccccgtctctactaaaaatacaaaaaattagccaggcgtggtggcgggcacctgtagtcccagctactcgggaggctgaggcaggagaatggcatgaacccgggaggtggagtttgcagtgagccgagattgtgccaccgcactccagcctgggcgacagggtgagacgccatccccaaaaaaaaaaaaaagtctcattggtcctttggttgtataggcagctgctgctattttcttttcttttcttttagatggagtttcactcttgttgcccaggctggagtgcaatggcgtgatctcggctcactgcaacctccacctcccaggttcagttctcctgcctcagcctcccaagtagctgggattataggcacccaccaccatgcccagctaattttttgtaattttagtagagctgggaagtcaccatgttggccaggctggccttgaactcctgacctcaggtgatccactggcctcagccttccaaagtgctgggactacaggcgtgagccactgtgcccggccagcttagattttctaatacgatttttattctttatatatattttgtattttatatgtgtatctatatgtgtttagagatggggtcttactttttttttttttttttgagacggagttttgctcttgttgcccaggctggggtgcaatggcaccatctcagctcactgcaacctccacctcccaggttccagtgattctcctgcctcagcctcctgagtagctaggattacaggcctgcgccaacacgcctggctaattttgcattttttagtagagatggggtttctccatgttggtcaggctggtcttgaactcccgacctcaggtgatatgcccgcctcagcctcccaaaatgctgggattacaggtgtgagccaccgcgcccggccgggtcttgctcttttgcccaggctggagtacaatggcatgatcacagctcactgaagtctagacctctagggctcaagccatcctcccacctcagcctcctgaatagccaacaccaaaggtgcatgccaccacacctgactaattttgtttatcttttgtagagacaaggcctcactatgttgcccaggctggtctcgaactcctgggctcaagcaatcctcccaccttagcctcctggggacctggcatgcaatcacagatgtgtgccagtgtgtcttggcacaggattcacttgctttccagcaaattgcaacaggaggtcacagagcaacagaaccgagatctgatccaagtgtctgtggagggtgcagctgccagaccctgtggcgaggtcaaatgtgcaggtgggtggctaacttgggttctgtcccttagccgtagtaacacatgaagggggaaacccctttcccttgctgcttggccagctctctggggacacaggagccaggtagggcaggggaacagaccctagggaaagcaaggtgaaagggaaaagcctggactagtggcacacacctgtaagtcccagccactcgggaggctgaggtgggaggattgcttgagcccaggagttcaagcctgcattgagctatggttgcaccactgcactgcagcctgggcacagagtgagaccctgacccaaataataatacataaaaatacagaaagagaaagaaatgacaacatgtggaagagcctacagagaagagaaacaataaagtgcttcctagtttgggggtcgtcagaagacggggccccacaggaggggactggtctttctgtgaggttcacttgaggccaggagtttctctgtttcctgatgttttggcatcttgggccttgctaatgccggaaagacagcttctcccagggtttgccgatttcttcagggttagctaatttgttggagagtttgcaaacaactggcttgtccaagagcacacggttcctatggaaagctcacaccccacaaccaccttttttgcagagctgtgacaatccaagcctgttgccctgacctgattactttagggccatgtgccaggcaattagggacagcacgtatgccccagagcctggagaaattattcaaaatagcccgtggcaactttcatctgcctcactgtgcctgtcccatggaaactataataaaggctcttacccacattttctcctgctctctccgcctcctttttttttttttgagacggagtctgcttctgttgcccaagctggagtgcagtggtgcaatgtcagctcactgccacctccgcctcccagattcagtgattctcctgtctcagcctcctgagtagctgggattacaggcagccgccaccatgcccggctaatttttgtatttttagtagagatggggtttcaccatgttggccaggctggtctcaaacgcctgacctcaggtgatctgcctgcgtcggcctcccaaagtgctgggattacaggcgtgagccactgccccaggtctctctctctctctttttttttttttttttttttttgagaacagggtcttgctctgttgcccaagctggtatgcagtggtgcaatcacaactcactgcggccttgacttcctgggcccaagcaatcctctcacctcagcctcccaagtagctgggaccatggggcatacaccatcatggccagcgtgtaaaaatgggatcttgctatgttgcccaggctggtctcgaactcctggcctcaagcaattctcccaccttggccccccacagtgttgggattacaggtgagagccactgtgtctggcctcctgctacattttaaaataagaagcaggggccgggcgtggtggctcacgcctgtaatcccagcactttgggaggccgaggcgggcggatcacgacgtcgggagatcgagaccatcctggctaatgcggtaaaaccccgcctctactaaaaatacagaaaaattagccgggcgtggtggtgggcgtctttagtaccagctactggggaggctgaggcgggagaatggcgtgaacccggaaggcggagcttgcagtgagccgaatcgtgccatgcactccagcctgacgagactctgtctcaaaaaaataaataaataaatataaaataaaataagaagcaggtcaggcacagtggctcatgcctgtaatcctagcactttgggaggctgagacaggcagatcacctgaggtcaggagtttgagaccagcctggccaacatgatgaaaccctgtctctactaaaaatacaaaaaattagctgggcatggtggcaggtgcctgtaatcccagctactcaggaggctgaggcaggagaatcgcttgaacccaggaggtggaggtcgcagtgagctgagattgtgccactgcactccagcctgggtgaccaagcaagattccattaaaaaaaaaaaaggctgctggttgaggtggctcacgtctgtaatcatgtcactttgagaagctgaggagggaggatcgcttgaggccaggagtttgagaccagcctgggtggcatagcaagactccatctctaaatataaggtttttttcagccaggtgtggtggctcattcctgtaatcccagcgctttgagaggctgaggtgggtggattacctgatgttaggagttcaagagcaacctggccatctccagcctgggcaacaagagcgagactccatctcaaaaaaagcaaaacaaaaaaaatacttttttctaagagacagtgtcacctaggctggagtgtcacccaggctgtgtcacccaggctggagtgcagtggcatgatttcagctcactgcagcctcaacctcctgggctcaatcaatcctcccacctgagcctcctgagcagctgggaccgaaggcatgcaccaccacacccggctaacttttgtgttttttgtagatgctgggtttcgccattttgcccggactggtctcgaactccagagctcaagacatcctcctgccttggcctcccaaagtgccaggactacaggcgtgagccactgaacccagctggctaaataaacttcctaaattgattgagacctgactcagatactttgagtttacacagctcaattcatatctgttcatgcattaaatgaatggattttctttttcttttcttttttttttttttgagatggagtctcgctctgttgtccaggctggagtacagtggcactatctcggctcactgcaacctctgcctcccaggttcaagtgattctcctgcctcagcctcccgagcagctgggattacaggcatgtgccaccatgcccagctaatgtttgtatttctagtagagacgggtttttaccatgttggccaggctggtctcaaactcttgaccttaagtgatctgcccacctcagcttcctgaagtgctagtattacaggcatgagccaccgcgcccagacttttttttttttttgagacagagttttgctctttttgcccaggctggagtgcaatggcacgatctcagctcactgcaacctccacttcccaggttcaagtgattctactgcctcacccttccgagtagctaggattacaggcacccgccaccatatctggctaatttttgtatttttagtagagaaagggtttcaccatgttggccaggctggtcttgaactccttgacctccagtaatccacccgcctcggcctcccaaagtgctgggattataggcataagccactgcacccggcctaaatgaatggattttctgctcctgttcaggggcttgggtaaagctgtcatgaggataaaaggatcagagagatgaaggggttatagaagtgggagtagtgccaggcacggtggctcaagcctgtaatcccagccctttgtgaggctgaagcagtcagatcacttgaggccaggagttcaaaactaacctgaccaacatggtgaaaccccatctctacaaaaatacaaaaattagccaggtgaggtggcaggcgcctgtaatcccagctactcagaaggctgaagcaggagaattgcttgaacctgggaggcggaggttgcagtgagctgagatcgtgccattgcactccagcctgcacaacagagagagactctgtttcaaaagacaagaaaagacaagacaaggctgggcgcggtggctcacacctgtaatcccagcactttgtgaggccgaggcgggcggatcataaggtcaggagatggagaccatcctggctagcacggtgaaaccccgtctctactaaaaatacaaaaaatttgccgggcttggttgcaggtgcctgtagtcccagctactcaggaggctgaggcacgagaattgcttgaacctgggaggcggaggttgcagggaggcggaggttgcagtgagccgagatggtgccattgcactccagcctgcacaacagagcgagactctgtttcaaaagaaaagagaagaaaagaaaagacggtagttacaggtcatagggagtgggattctgggcgtgggctatgccatatttcacaggggtgtcagcggggttgggagctccgggaattgccctcaagtcacaggttcctgctttgtgggtcctgaggcttccctctgccaaggaaaattcgggatttctttctgctaatgtctgggatcattggccactgcccaggctgcctcagtttcccctgggagaccaaaaacacaagggtgggggaagccacagagcacggggtttgcagcacctttctcaggcaggtcaggggcctcttgtgactggatgaggctattttgcctaccctgaattcacactaggagaaaatcgtgcctttcccggagtatttacccaccaaagaggagtagggctgtgaacagcgtccggagtgaggtgtccaggtatgaattatgtctctggccacatgacactagacaaatttagagattccccctaagcctcagttttctcatctgtgacatgagagaaataatactaggttggtgcaaaaataattgcgttttttgccattacctttttgttttaaagacagagtttcgctctgttgccaggctggagtgcagtggcatgatcttggctcactgcaacctccacctcccgggttcgagcgattctcctgcctcagcctcccgagtagctgggattacaagtgcgcgccaccacacccagctaattttgtatttttagtagagatggggtttcaccgtgttggtcaggctgatcttgaactcctgaccttgtgatccacctgcctcagcctcccaaaatgctgggattacaggtgtgagccactgtgcccagctttgcctttacttttaattgcaaaaaccgcaataacttttgcaccaatgcaatatttgcttctggagaggatagtgtaggttaaatgagatgttggtggataacccttagcagaggggctggcatgatccattgtggaccctataaatagcctagaaaattagaagagaagctggacgcaatggctgatgcctataatccaagcaatttgggaggccgagacgggaggatcacttgaggccaggagtttgagaccagcccgggcaacatagtgagaccccatctctaaaaataatctttaaaaattagccaagatggccgggcacggtggctgacgtctgtaatcccagcactttgggaggccaaggcaggtggatcacctgaggtcaggagttcaagaccagcctggccaacatggtgaaaccctgtctctacaaaaatacagaaaaaaaattagccgggcatgatggcaagtgcctgtaatcccagctactcgggaggctgaggcagaagaatagcttgaatctgggaggcagaggttgcagtgagccatgatcccaccattgcactccagcctgggcgacagagagagactctgtctcaaaaaaaaaaaaaaaaaattagccagccatggtggcatgcacctatagtcccagctacttgggaggctgaggtgggaggatcgcttcagcccaggagttcaaagctgcattgagctatgactgggccactgcactccagcctgggcaacagagtgagaccctgtcttaataataaaaatacagaaagaaaaagaaatgacagtgtgtggaggagctcatagaggagagaaacaatgaagggcttcctagtttggggggtcttcggaagatggggccccatgggaggggactggtctttgagttgttgaggtaatttaattcattgttctttcgtgagctaattgtatgtggaaatttatgtaaatctttggtaatcatcctttgaggaatctgctgctatcaagaaagaaaaagtcagtgtcaaccagcaaaaaaatggaaaaaatcaaatagtgattgctgttttttttttttttttgagacggagtcttgctctttcgcccaggctggagtgcagtggcactatctcagcttactgcaagttctgcctcctgggttcatgccattctcctgcctcagcctcccaagtagctgggactacaggcacccgccaccatgcccagctaattttttgtatttttagtagagacggggtttcaccgtgttagtcaggatgatggtctcgatctcctgacctcgtgatccgtctgcctcagcctcccaaagtgctgggattacaggcgtgagccaccacgcccggcctttttttttgagagtgtctcactctgtcacccaggctgcagtgcagtggcatgatctcagctcactgcaactgccacatcctgggttcaagtgattctcctgcctcagcctcctgagtagctgggagtacaggcatgcgccaccatgtctggctaatttttgtatttttttttttttgtagagatggggattcaccatgttgaccaggctggtcttgaactcctgacctcaagccatctgcccacctcagcctcccaaaatgctgggattacaggcatgagccaccgcgtctggcctatttgaatttttttaatccatactgcaatgctagtggagaaggagaatgagttttatggtgtggtttcaagagccctgcagaaaaagtaagtatcttgaagcaggttgttattattattattattattattattattattattattattattttctggagacagtctcgctgtgttgcccatgctggagtgcagtggtgcgatctcaggtcactgcaacctccgcctcctgggttcaagcaattctcctgtctcaggctcccaagtagctgggattacaggcccaagcctccacgcccggctaatttttgtatttttggtagagacagggtttcatcatgttggccaggctggtcttgaactcctgatctcaagtgatccacccacctcagcctcccaaagtggtgagattaaaggtatgagccactgcacacagcctatgttgtttgtttgtttgttcgcttgtttatttctgagacagagtctcactctgtcgcccaggctagagtgcagtggcaccattgcagctcactccagcctcgacttcctgggcccaagtgatcttcccacctcagccttccaagtagctgagactacaggcatgggcacaaaatgttgaataaaataacacagccttcgttaccaggaatcctcagtaaagcaaagctcatctactactatttagttttcggtttatttgtggactcttcggttcttgcagtgatgtatgtactcatgatgaattcttcttggacactgaaccatatcctctcactgtggaaagctgggaattacgctagtattgttcatccaccacgtggtatgcgggcatttctgaacattccctgacttcagaaaaagatgaccccaggacatttggtggtttctgttggccagttcagacctgaaattaatcttcctttgcagatcagagcttttgagaaatagttaaacaagatgattgaggccaggcgcggtggctcatgcccgtaatcccagcactttcggaggctgaggcaggtgggttacctgaagccaggagttcaagaccagcctggccgacatggtgaaaccatgttactactaaaaatacaaaaaacattaaccaggcatggtggcatgtgcctgtaatcccagcttcttgggaggctgaggcatgagaattgcttgaacccaggaggcggggttgcagcgagctgagatcgtgccactgcactccagcctgggtgatagagcaagactctatctcaaaaacaagatggtgattgagtcacctcctttattgaaacctgttctcattagagattgttgtaccaaagatgatgagacttcagatgaaccaactaagaaagctgtctgaggatttaggaattttaaaaggtgtggaatttcaaagaaatattccattttgatgaagtaaaggttaaagaagtgcttgtctgaagagacagttgatctgcataccacgcagaacaagtattttgggatgggtgttgtgaaagttttggccaacacaatttttttttttttttttgagacagaatcttgctctgccatccaggctggagtgcaatagcatgatctcggctcactgcaagctccacctcccaggttcaagcgattctcctgcctcagcctcctgggtagctgggactacaggcaggtgccactatgcccggctaatattttgcattcttagtagagactgggtttcacagtcttagccaggatggtcttgatctcctgacctcgtgatctgcccacctcagcctcccaaactgctgggattacaggcgtgagccaccatgccggccttttttttttttttaagagatagggtcggtccaggccaggtgcggtggctcacccctgtaatcctagcactttgggaggccgaggcaggcagattgcctgagctcagaagtgtgagaccacgctgggtaacatggtgaaaccccgtctctactgaaatacaaaaaattagccagatgtagtggtgtacgcctgtagtcccagctactcgggaggatgaggcaggagaattgcttgaacccgggagatggaggttgcaatgagctgagatcactccagtgcactccagcctgggtgacagagtgagactccatcccccaaaaatatatatataaataaatccaataaataaataaatgagatagggtcggttgggcatagtggctcacacctgtgatcccagcactttgggaggccgaggcgggtggatcacctgaggtcaagagttcgggaccaccctggccaacatggtgaaactccgtctctactaaaaatacaaaaattagccaggcgtggtggtgcatgtctgtaatcgcagctactcgggaggctgaggcagggaattgcttgaacccgggaggcggaggttgtagtgagccaagatcgtgccactgccctccagcctgggcgacagagcaagactccatcaaaaaaagaaaaaaaagactgggtctttctgtcacccaggctggcgtgcagtgacatgattatagctaactgcaacctcgaccactgcggctcatgtgatcctcctgcatcaacctcctgagtagctgggactacaggtgcacacaaccacacccagttaatttttaaagtttttgtagagatgaggtctcaatatgttgccagagctggtctcaaactcctgggctcaaggagttcaaaagttacgaaaattataagttacctttttgagagagagagaaagtcttgctatgttgcccaggctggagtgcggtggttattcacagacaggatcatggcacactacagccttgaactcctgggctcaaatggtcctcctgcctcagcctcccaagtaactgagaatacaggtacatgcccagctaaaagttactttaattaaaggtaactatctaggccgggcacagtggctcacgcctgtaatcccagcactttcggaggccgaggcgggcggatcacgaggtcaggagatcgagaccatcctggctaagacagtgaaaccccgtctctactaaaaatacaaaaaattagcagggcgtggtggcaggcgcctctagtcccagctacttgggaggctgaggcaggagaatgacgtgaacctgggaggcagagcttgcagtgacccgagatcacgccactgcactccagcctgggcaacagagcgagactccatctcaaaaaaaaaaaaaaaaaaaaaggtaacaacctaggcagggtgcggtggctcatgcctataatttcagaactttgggaggctgaggcaggcagatcacgaggtcaggagatcaagaccagcctggccaacacggcaaaaccccatctctactaaaaatacaaaaattagctgggcgtggtggcacctgcctgtaatcccagctactcaggaggctgaggcaggagaattgctggaacccgggaggtggaggttgcagtgagctgagatcgtgccattgcactccagcctgggtgacaggacaagactccgtctcaaaaaaaaaaaaaaaaaaaaaaatctatagtaaatgccttctaaaaccgtatctttatcactgccctataactctatatagattcttggctactaagccaatagctgggatgatataaatgtaatgcagctgctatctgaataacaagcatggaaaagtgaatatgtgtgtgtgcagataatgctctacaaacatacaacttatgacattttctgtaaccataatcaatttcttgtagttcagtgagttgacccccttcatgatcagtgttaggggcatgtgaaagaggtgattggttgattgattgattgattgattgatttagagacagagtctctgtctgtcacccaggctggagtgcaaaggtgtgatcttggctcgctgaaacctccgcctcctggctgcaagcaattctgctgcctcagcctcccgattagctggaaatacaggcacctgccaccacgcccagctaatttttgtatttatattgaagacgggatttcaccatgttggccaggctggtctcaaactcctgaactcaagtgatccacccacctcggcctcccaaagtgctgggattacaggcatgagccaccacacctgaccaaagaggtgtattattcttttgcaatttccttttaaccagctggttttgttatctacttctgattatgtcgctgatacaggccattttctgttatcagatcaaaaagcagcaaagccaggcatagtagtgcacaactatagtctcagctactcaggagcctgatgggagaattgcttgagcccagattgaggccacattgagctgagatggcactaccatactctagcctgggtgacagagcgagaccctgtctcaattaaaaaaagaaaagaaaagaaacaggccaggcgcggtgtctcacgcctggaatcccagaactttaggaggccgaggcgggtggatcatttgaggtcaggagtttgagaccagcctggccaacatggtgaaaccctgtctgtactaaaaatacaaaaattagccagatatggtggcaggcgcctgtaatcccagctacacaggttgctgaggcaggagaatcgcttgaacccaggaggcagacagaggttgcagtgagccgagattgcgccattgcactccagcctaggtgacagagtgagactccatctcaaaaaacaaacaaacaaagaaaacacaaaacttttatggaattccagaatcctttcttccttcactacttcctctacttttgctctatttcaaattatttatttttgacctcataattttttgtgtgtggatgggtaggcagaatgaattaacagtacaaatcttacctcaaagactagctataaaataagaaaaagcgccaagccagagtttgaacttccaggttataatactgattctgtcatcaaacagctttgtgacaccaaaggagtttactaagttctttggatttatttattattatgttagatggagtgtcactctattgcccaggctggagtgcagtggcacaatctcggctcactgcaacatctgcctcctgggttcaagcgattctcctgcctcagcctcccgagtagctgcgattacaggcatgtgccaccttgcccagctaatttttgtctttttagtagagacggggtttcaccatgttggccaggctggtctcaaactcctggtctctagtgatttgcctgccttggcctctcagagtactgagattacagacgtgagccactgtgcccagctggaaatggattttaaatctctgagatgtgaaagcattttctaagcttaagagcagagggcaaaatggtcaagcaatgtactgagttgtctctctttaaaacttaaagaggaattcttagccaggtgctgtggctcatgcctgtaatcccagcactttgggaggccaaggtgagagaatcacttgagcccaggagtttgagaccaacttgggcaatgtagtgagaccacatctctgcaaaaaataaaaattagctgggtatggtcgcacatgcctgtaatcccacctacttgggaagctgaggtgggaggatcacttgaacccaggaggctgaggcttctgtgagctatgatagttccactgcaccccagcctgggcaacacagtaagactctatctctaaaaaagaaaagagaatgagacatcttttgtctattttaatctaacctttttttttttttcctgaagactcttaccccagcttgcagcttttttttttttttttttttttttgacagagttttgctttgtcgtccaggctggagtgcagtggcgtaatttcggctcactgcaacctctgcctcccaggttcaagtgattctcctgtctcagcctccctagtagccaggattacagacacacaccaccatgcccagctcatttttgtatttttagtagagatggggttttgccatgttggccaggctggtctcaaactcctggcctcaggtgatccaccctcctcagcctcccaaagtgctgggattacaggcatgagcgactgtgcccggccagcttgctgcttttagcataaatttcaggcttctggtgagctcttggcaacatgtaccaagaatcataacgtgtttgcctttttccagccagtatttccactgctgggaatccatgagaaagaaatatgagaaataggcaaatatttacatataacaatgcttctgttattgttattttaatattcagttagtgcaaagcctgaggtatccggtacgctgtgtacaatcacgtgataagatccaatatgcagttatgaaaaatgtttgtagattttctttaacaatatgtaaaatattttcatactatttttacagaaaaaagcaggatattgggaggccaaagcaggcggatcacttgaggcaaggtgtccaaggccagcctggccaacatggtgaaaccccatatctactaaaaatacaaaaaattagcagagtgtggtggcacaagcctgtaatcccagctatttgggaggctgaggcaggagaattgcttgaacctgggaggcagaggttgcagtgagccgagatggcaccattgcactccagcctgggtgacagagtgagactccatctcaaaaaaaaaaaaaaaagaaagaaaaagaaaaatgcaggatataggataaaacatttttttctagatgttgccgtaattaaaaattttgttgcctatatggccaggagtggtggctcacgcctgtaatcccagcactttgcgagccgaggtgggtggatcacttgaggccaggagttcgagatcagcctgggcaacatggtgaaaccccatctctactaaaaatacaaaaattagccgggcgtggtggtgcatgcctgtaatgccagctactcgggagggtgaggcatgagaagtgcttgagtccgggaagtggaggttgcaataagctgagattacaccgctgtgctccaccctgggtgacaaagcaagactgactcaaaaaaaaaaaaaaaaaaaaaagatgtttcctatatagcaacaggaaatctcactctttgctgagagaaatgccaaacagtacagccactctagaagacagtgtgacagcttcttacaaaactaaacatactcttaccatataaccaattaatttcactcctagatatttacccaaacgagttgaaagctcatgtctacaagaaaacccgcacatgggccaggtgcagtggctcatacccgtaatcccaacactttgggagaccgaggcgggcagatcacgaggtcaggagttcaagaccagcctggccaatatggtgaaaccctgtctctactaaaaatacaaaaattagctgcgcgtggtggcatgtgcctgtagtcccagctactcaggaggctgaggcaggagaatcacttgaacccgtgaggcagaggttgcagtgagccgagatcacaccactgcactccagcctgggcgacacagggagactccgactcaaaaaaaaaaaaacaaactggccgggtgcggtggctcatgcctgtaatcccagcactttgggaggccgaggcgggaggatcacgaagtcaggagatcgagaccatcctggctaacacggtgaaaccctgtctctactaaatatacaaaaaattagccgggcatggtggcaggtgcctgtagtaccagctactcgggaggctgaggcaggagaatggcgtgaacccaggaggcagagcttgcagtgagccgagatggcgccactgcactccagcctgggcgagagagtgagactctgtctcaaaaccaaaaaaacaaaacaaaacaaaacctgcacacggatgtttacagcagtattattcataattgcataaaacttggaagcaaccaagatgcccttcgggagttgaatgaataaataaacagtggtactttcagacaatgggaactcattaattaaaataaatgagctcttgctgggcacagtggcacaagcctgtggtcccagatactcaggaggctgaagtggaaggattgcttgagcctaggagttccaggtcagactgggggacagagaaagaccatgtctctaaataaattaatttaaattacaatatattttttcttttcttttcttctaacacagaatctcactcttgtcacccaggctggagtgcagtagtgctatcttagctcagtgcagcctccgcttcccaggttcaagcaattctgcctcagcctcctgagtagctgggactacaagtgcgtgccaccacgcccggctaatttttgaatttttagtagaaacagggttccaacaagtttgccaggctggtctcgaactcctgacctcaagtgatctgcccaccttggcctcccaaagtgctggaattacaggtgtaagccactgtgaccagcctaaaaaaattttttaattatccaggcatgatggtgcacctgtaatcccagctactcagggaggctgaggcagggggatggcttgagctggagaggtcgacactgcagtgaactgtgatggtgccactgcactccagcctggatgacagagaaagagcctggctaaaaaaacatataactagccgagcaaaactccttctcaaaaaaaaaaaaaaaaaaaaagtgagccctaatgtaggctgtggactcggggtgatgaggacgggtccctggagattcatcaagtataaccaatgcaccactctagtggcggacattgataaggaggaggctgggcttggggagcagggtagatatatgggaaatctctgtactttccactcaattttgctgcaaacctgaactgctataaatcagaacgtttatgggctgggtgcagtggttcacgcctgtcatcccagcactttgggaggccaaggcaggaggatcgcttgagcccaggagtttgagaccaccctgagcaacatagcaaggccccatctctacaaaaaaaaaaaaaagaaagaaaatacaaaaattagccaggtgtggtggtgtgcatctgtagtcccagctactcgggaggctgaggcagaaggatggcttgagcctgggaggtggagttggcactgagctgtgattgcatcactgcactccagcctcagtgacagagccagaccttgtcttaaaaaaaaaaaagcccatgggaaaacaaatactgttttcctctgcttgagtgaaagaagccagtctcgctgggcgcggtggctcacgcctgtaagtcccagcactttgggaggccgaggtgggcagatcacctgaggtcgggagttcgagaccagcctggccaacatggagaaaccccgtctctactaaaaatacaaagttagctgggcatggtggcgcatgcctgtaatcccagctactcgggaggctaaggcaggagaatcgcttgaacccaggaggtggaggttgcagtgagccgagatcgtgccattgcactccagcctgagcaacaagaatgaaactccatccaaaaaaaaaaaagaaaagaaagaaagaacccagtctcacaaggctatccagtgtgtgactgattccatttatacaacagtcccggaaaggctaaattatggcgacagagagccgatcagtggttgtcaaggagaaggaaggaaggatgtgactcctaacgggcagtgtaagggaattttacggggtgatgaagttgttctttttctttctttctttctttctttttttttatttgagacagagtctcgctctgtcacccaggctggagtgcagtggatctcggctcactgcaacctccatcccctgggttcaagcaattctcctgcctcagccccccgaggacctggaaccacaggtgtgcgccaccatgcctggctaatttttgtatttttaatagagacggggtttcaccacattggccaggctggtctcaaactcctgacctcaggtgatccacctgcatcagcctcgcaaagttctgggattacaggcatgagccaccccatccagcattttttttttctttttttttttctttttctttttctttttcttttctttttttttttttctttttttttttttttttttttttttgagacagtcttgctctgtcgcccaggctggagtgcagtagtgtgatctcagctcactgcaacctctgcctcccagattcaagtgattcttatgcctcagcctcccaagtagctggtattacaggcatgcgccaccatacctaggtcatttttgtatttttgatagagatggggtttccccacgttggccgggctgctcttgaaatcctgaccttatgtgatccgctggactcggcctctcaaagtgctggcgttacaggcatgagccacagcgcccagccagattttaatttttttttttatagatagggtctcactacattgcccaggctggactccaactcctaggttcaagcaatgccgcctcggcctcccaaagtgctgggattacaggtatgaggtgctgcatccagcctaaaaaattgatttaatgcaaaaaaaaaaaagaaaatcctggtgcctgacccctggctgtcctcagctggcccataagaccctgatgacttttgagctctgaatcaagggttggcatatctagacctgctgcaagctacagatactcagaaccatgcacgaggttgcaaatcctacatatgatttccagaatccacatcccatctgcactctttctggtagagcacaccttgttcctggggctccaggacaaatgggtgcatcaaagctaacttccggccctgggcagtggctcacgcctgtaatcccagcactttgggaggacgaggcaagaggatcacctgaggtcaggagttcaagaccagcctggccaacaaggtgaaaccccatctctactaaaaatacaaaaattagctggatacggtggcccatgcctgtaattccagctactcaggaggctgaggcaaaagaatcgcttgaacctgggaggcggaggttgcagtaagctgagctcatgccactgcactctagccttggagacaaagtgagattctggcaaaagaaaagaaaagaaaaaaagctaccttccaccagccacaatggctcacgcctgtaatcccaacattttgggagcccaggagtttgagaccagcctgcagcctgggcaacatagcaggaaactctctctaaaaaggaagaaaagaaaaattcgccaggcatggtggcgcacacctgtagtcccagctacttggaaggctgaggtgggaagctggcttgagcctgggaaattgaggctgcagtgagctatgatcatgccactacactccagcctgggcaacagagtgggaccttgtctcaaaagaaaaataaaaagtctaccttctacgtggtctctctggctacctcagtcatactgatcccttggctatactgatcattcagtcacatcccactctgacccctggactcccctggccactgacctatagtgacctgctctctttggtccctgcagggagacacatttgaaacctacaagtacccaggggaaaaaaaaaaaaaaaggccattacttccttaatctgtatctgtttttaagtggaattgtatccataagcaacccagagtgctattatgtttcaaatttatataaacagtatcacactaaactaacattgcacaacttgaatttctttttgaaacagcaccacattaagatacatttatattgacatagagtagagctggagagagtgagagtgagagcaaggcaagagagagaaagagagacacacagacagggagagttacttattccttttcactcctgtttaatattccattaccttaccattacatttcgttctcctttcatttctctactccctcattgatggacgttctgatagtttctttttttcttttcttttttttttttttttttttttttgaggcagagttttgttcttgctgcccaggctggagtgcaatggcgcgatcttggctcactgcaacctccaccacctgggttcaagtgattctcctgccttggcctcccaagttgctggtattacaggcatgcgccaccacgcctggctaattttgtatttttagtagagatagggtttctccatgttggtcaggctggtctccaactcccggcttcaggtgatctgcccgcctcggcctcccaaagtgctagggattacaggtgtgagccactgcgcccagccttttttgtttttgtttttgtttttgtttttgttttgttagagatggggttttatcccgtcacttaggctggagtgcagtggtgtaaacatggctgactgcagcctcgacttcctgggctcaggtgatcttcccacctcaggctcttgagtagctgggaccacaggtatgcaccaccatggccagctaatttttagtttttttagagatggagtcttgctatgttgtccaggctggtattgaactcctggactcaagcattcctcctgcctcagcctcccaaagtgctgggatgacaggtgtgaaccaccgagcccaacctagtagttaagttttgaggagtcaaaagttatatgtgaggggctcggcacagtggcctgtcatcccagcactttgggaggtggaggctggcagatcacttgaggtcaggagttcaagaacagcctggccaacatggcaaaaccctgtctctactaaaaatacaaaaattagccaggtgtggtggcacgcacctgtggtccagctattctggaggctgaggcatgagaatcccttgaacccaggaggcagaggttgtagtgagccaggattgtgccattgcactccagcctggatgacagagtgagactgtctcaaaaaaagaaaaaagaaaaaaagttatatgtgggtccaggtggggtgactcatgactgtcatcccagcactttgggaggccaaggtgggaggatcacttgagtccaggagttcaacaccagcctggaaaacatagcaagactcctgtctctacaaaaaattagctggacatggtggcaggtgcctgtagtcccatcaattcgagaggctgaggcaagaagatcacttgagcccaggaggtcaaggctgcagtgagctatgattgcaccactgcactccagcctgggtgacagagagagagagacagagagagagcaacggaaggaaggaaggaaggaaggaaagaaggaaggaaagcgataaatgaaaaggaggccaggcacagtggctcatgcctgtaatcccagcactttgggaggccaaggaaggttgatcctctgaggtcaggactttgtgaccagcctggccaacatggtgaaaccccgtctctactaaaaacacaaaaactagctgtgcatggtggtgggcgcctgtaatctcagctacttgggaggttgaggcaggagcatcacttgaacctaggagccggaggttgcagtgtgctgagattgtgccactgcactccagcctgggcaacaagagtgaaactctgtcaaataaaagaaaaaagagaaggaaagaaagaaaggaaggaaggaaggaagacagagaaaggaaggaagaggaagagagaaagggagggtagggagggaaggaaggaaagaaagaaaatgaaaaggacaaaaactccaaaggacaaatgagtctttcacaaaaggtgatctccaaatggctgataaatgaaagagggctgacctcatgagtcatcagagaaatgcacatgaaacccaaaatgctagcggggcgtggtggctcacgcctgtaatcccagcactttgggatgccgaggccagtggatcatgaggtcaggagttcgagaccagcctggccaagatggtgcaaccccgtctctactaaaaaatacaaaaattagtcgggtgcggtggcgggtgcctgtaattccagctactcgggaggctgaggcaggcgaatcacttgaacccaggaggcggagtctgcagtgagccgagatcacaccactgcactctagcctggtcgacagagcaagactccatctcaaaaaaaaagaaaatttaatatcaagttatactcccacactctggagagcgtgtgaaatggtacaaccgctttggaaaaccctggcaatatccagaaagctgaacaaacacctacacaatatgaatcagcatttctactcctaagtataaacttaaagaatatacattgttgcattcatccagaaactggccagaatgttcacagcacctgtgcttatcacagccagaaattggaaacaacccaaatgcctaaaaaagtttaggtaaataaactgtggtaagttcacaaaagggaagacagcggttctcaaccgggtggtgatttttttttttttttttttttttttttgagacggagtttcactcttgttgcccgggctggagtgcaatggtgtgatctcagctcaccgcaacctccgcctcccgaattcaagcgattctccctcctaagccttctgagtagctgggattacaggcatgcaccaccgcgcctggctaatgtttgtgtttttagtagaaatggggtttctccatgttggtcaggctggcctcgaactcccgacctcaggtgatccacctgccttggcctcccaaagtgctgggattacaggcgtgagccaccacgtctagtcgactgggtggtgatcttatcgcttctaagggaatatttggcaatgtctagcgatgttttgcgttgtcagaaccgaagggaggagtgttactgtcacgctgtgagtagaggcctgggatgccgctaaatacatacaatgtgtaggaacaaagattattcagctccaaatgtcaacagcagttgagaaaccttgctataccaaatggcaacgggctggacgcggtgtctcatgcctgtaatcccagcactttgggaagccaaggcgggaggatcacttgaggtcaggaatttgagaccagcctggccagcatggtgaaaccctgtctctactaaaaatacaaaaatcagccgggcgtcgtgacacagtcctgtggtcccagctatttgggaggctgaggcaggagaatcacttgaacgtgggaggcagaggttgcagtgagctgagatggtactccagcttgggtgacagagcgagactgtctgaaaacaaaacaaaaaaaaaatggcaaggaacaataactgtaacctacaaaaatatggatgaaccacacaaacctggtgttacacaaaagaaaccaaacataaaggaaacgtcctgcttgttttcatttatataatgttcaaatagcagacagagtgattctagactgttaaaaatcaagataagggctgggcacggtggctcgcacctataatcccagcattttaggaggctaaggcatgaggattgcttgaggccaggagttccaacccagcctgggcaacatagtgaaacccatccctacaaagaaatgcaaaaatttgctgggcgtgatggcgtgtgtgcctgtagtcccagctacttagggggctgaggtgggaggatcacttgagcctgggaggtcaaggctgcagtgagccgtgatcgcaccacttcactacagcctgggtgacacagcaagaccctatctcttaaaaaaaaaatggggttaccctttgtggagagtagcagggcagggtacaatgggggacttctaggggctggtgatgttctgttcttttttttccttttttgagatggaatctcactctgtcggccaggctggagtgcagtggcatgatctccactcactgcaagttccgcctcccgggttcacgccattctcctgcctcagcctcccgagtagctgggactacaggtgcctgccaccatgcccggctaatttttttgtatttttagtagagacagggtttcaccgtgttcgccgggatggtcttgatctcctgaccttgtgatccacccgcctcggcctcccaaagtgctgggattacaggcgagagccaccgcgcctggactgttgtttttttttttttttttttggtttttttttttttgagacagagtctcactctgtcgcccaggctggagtgcagtggcttgatctcggcttactgcaagtttcgcctcccgggttcacaccattctcctgcctcagcctaccaagtaggtgggactacaggagcccgccaccatgtccagccaatttttttgtatttttagtagagacggggtttcaccatgttcgccaggatggtctcaatctcctgacctcgtgatccacctgcctggcttcccaaagtgctaggattacaagtgtgagccactgtgcccggccttttttttttttttttttttttgagacagagtctcactctgtcagccaggctggagtgcagtggtacaatctcggctcactgcaacctctgcctcctaggttcaagtgattctcctgcctcagtctcccaagttgctaggactacaggtgcctaccaccatgcccggctaatttttttgtatttttagtagagacagggtttcaccatgtcggccaggatggtctcaacctcttgaccttgtgatccacctgcctcggccgcccaaagtgttgggattacaggtgtgagccacagctcccggcctatgttctgttcttgacctaatctaggtcctggctataccctacattcacatgataaaaattccttaaggcatatatttatgattttgttcttgttgttgttgtttgttttggtttttgttttttttgagatggagtcttgctctgtcgcccaggctggagtgcaggggtgtgatctcggctcactgcagcctccacctcctgggttccagcaattctcctgcctcagcctcccaagtagctgggattacaggatgcccagctaatttttgtatttttagtagagacagggtttcaccatgttggtcaggctggtcttgaactcctgacctcaggtgatctgcctgcctcggcctcccaaagtactaggattacaagcataagccaccacacctggccacatttatgaatttatgcattgttttctttactaaaagtgtgctacacttttcttcctttcttcttcttctttgtttgtttttgagacagggtctcactctatcactcaggctggagtacagtggcacaatctccactgactacaaatcccaggcacaagtgatcctctcacttcagcccccctcgagtagctgggattacaggtgtgcaccaccatgcctggctaatttttgtattatgatagagatggggttttgccatgttacccaggctgatctcaaattcctgggcttaagcgatctacccacctcagcctcccaaagtgctgggattacaggcatgagccaccatgctgggccttatgtgtgctatatttaaacaaaagcttctaaaaattaaaaaaaaaattatcctatcttccttccacccctctgtcctgtttagaccttacccacgctgcactgggtgacttcacttctcctacctgccccctctcctacagcccctccgatagaaaacaaccaggaatggccaggcatggtggctcttgcctataatctcagcactttgggaagcccaggtaggaggatcacttaaaaattagatgaggtggcatgcccctgtaatcacagctactcaggaggctgaggcaggaggatcacttgagcctgggagctggaggctgcagtgagctacaatggtaacactgcactccagactggacaaagacaaatacaccctgtctcaagaaaaagaaagaagagagagagagaaagaagaagaggaagaggaagaggaagaagaagaagaggaagaggaagaagaagaagaagaggaagaggaagaagaagaggaagaggaagcagaaggaggaggaggagaaggaggggagggagggaaggaaggaaggaagggagggagggaggaaggaaggacccacacagtggctcacacctgtaatcccagcactttgggaggccaaggtgggaggaccacctgaggtcaggagtttgagaccagcctggccaacatagtgaaaccccatctctagtaacaatacaaaaattagcctggcatggttgtgcatgccttcagtcccagctacttgggaggctgaggcaggagaattgctcgaacccagaaggtggagtttgccctgagccacgatcgtgccacagcactccagcctgggcaacacagcgagactgagtctcaaataaaaaacaaaaaaagagaaaagaaaataaagcaaccaggggaattcctggggcacacaactaagactatgttccttcctgctctaaactctcccatggctccctattacccccaagattagatcaaagtctttattgagactcccaaggactttctctacttcagctctggttgtcttgcagcctgatctctacctgctcttgctgcttctcacatcattaaccttgggccctgaaggtgcagcttccaacttctgggcctttgcacctgcagtcagctttgcataattgcctgactgcccctggcacattcttgttctttgagattcagcttgaatgcctctgctctgggaagcatccctctccttcagaccctccctcccacccctacccggatctaggggcccaggaggctttgggctgggaagattaagaagacgatgatgaataagttggttctagcagttccttccttccttcctttttccttcgttctttctttctttctttttcttctttctttctttcatttttcttttccattaagcatttaacccccttgtacacaattcactctttttaaagaaaaaaactgaggccgggcacagtggctcatgcctgtactcccagcactttgggaggccgaggtgggtgaatcacaaggtgaggagttcaagaccagcctggccaacatagtgaaaccccatctctactaataatacaaaaattagccgggcgtggtggcttgtgcctgtagtcccagctactcgtgagcctgaggcaggagaatcgcttgaacctgtgaggcggaggttgcagcaagctgagatcacgccactgtacactagcctgggcgacagtgtgagacccagtctcaaaaaaaaaaaaaagaaagaaaagaaaaaattgaaatgtaaggctgtgtaagatttgttttgaaactacacagtgtctttttttttttttgtacagttaatgcactactgaatgtgtctttagatagccctgtcctggtggtattttcaacagccactaaccttgcctggtataatatgggggttgtaaattgcaatggaaatttaaagcaggttcttgttggtgcacagcacaaattggttatatatggggatagtaggttttttgggtttttcgtttttttttttttttttttaagactgagtctcgctctgttgcccaggctggagtgcagtggcatgatctcagctcactgcagtctctgcctcccaggttcaagcgattctcctgcctcagcatcctgagtagctgggattacaggcacccgccaccaagcccagctaatttttgtatttttggtagagatggggttttctcatgttggccaggctagtctcaaactcctgacctcaggtgatccgcccaccttggcctcccaaagtgctgggattacaggcacgagcctccgtgcctggcctaggtttcttttctttcttttttcttttttttttttttgtagtcagtgcacacatatcacacatacactggggttttacaaaataagagacaaagctctgagtcaaatgcaaaagtttagatgctcactccatggtcctttcctccagggaagtccccactccctgagccaccccaggggactcctgggctggaaagaactgagaaaccccaggcctcttgctcctccagagttgcagggggacaaggcagaaaccccaaaggtcccgagaccctgagcttggacactgcccctcttttcctgcagcctcttcctgtgtccccagccctgcactcccatcccctcccccaactctgctggcccagccctggcctccctcccgcactcatttccggaggatgccccagcctgttgcagacatgggggaagtccagcctagttggggatgtcacaagggggtggggttagggctatttcttttattttttatttttttatttttttattttttttgagatggagtctcgctctgtcacccaggctggagtgcagtggcaccatctcggctcactgcaacctctgcttcccgggttcaagcaattatcctgccttaacctcccgagtagctgggattacaggcacacgccgccacgcccggctaattttttgtattttagtagagatagggtttcaccgtgttgcccaggctggtatcgaactcctgaactcaggcaatctgcccacctcagcctcccaaagtgctaagattacaggcatgagccaccgtgcccagtcagggctgtcttatgtctagttcatactctaaatgttcagacttgacatgccccagcctatctccagccaccctcctccaccgcccagcccggcagcccacatcctcactgacacggatatcaggcaggcttccttcaagaccgctgtttttgcccgttctcaactagagcccatagccttgctcagacacacaggcttggaaggccactaactcactgccagaccttgggcaagtcgctccacctccctgatcctgcccttctgcatctaaaaagtgaagtattaaaggaaaatgcatctgtctgcacgaaagcagaaacacagctcctaggttctggttccagcggctcacaggctgtgtgactttgggccagtgtcctaacctctctgggcttcggtttcctcacctgtcaaagaggaattaagaggacccacctcacaaggctgttgcaggatcagatgagttcatttcaaatagtgtctgcagcctgagcaacttagtgggaccccatctctaacaaaatttaaaatgtggcatgaacctgtagtcccagctacttgggaggctgaagatggcttgagcctgagagctggaggttgcagtgagctatgattatgccactgtactccagcctgggcaacagagtgagaccctgtcttttttttttttttttttttttttgtgacagagtctcactctatcgcccaggctggagtacagtggcatgagagatgaaacacaccccaaccaggtgtctgccttgcagctgggactagcttctccccatacttcctcctgtctttacccaaggggccttcaactaccgtgcacctcccttctgagcagacaccaaggacatcctgtctccagcccagacacacactctgagcttcctctatgtgcacctcccacagccccctggagatctgcaccttctaacatccaatgccacatcttccctccagatctgctttcaccctgtgctccctgcccagagatgggcaccgagccaggcccgcctgcccagcatagtccaggcctggggggtagaccttcccatcctctgcctccccctcctcccttccctgggtcccccagactccagacaccctcatctcggaaccggactctgttttgctccgttctctccactcacctcccaccctgcagccctggtcactctattttttttttttttgagacggattctcgctctgtcacccaggctggagtgcagtggcgcgatcttggctcactgcaagctccgcctcccgggttcacaccattctcctgccttagcctccggagtagctgggactacaggtgcccaccaccacgcctggctaattttttgtatttttcctagagacggggtgtcaccgtgttagctaggatggtctcgatctcctgacctcgtgatccacccgcctcagcctcccaaagtgctgggattataggcatgagccaccacgcctggcttaatttttatttttatttttttgagatggagttttgctcttgttgcccaggctggactgcagtggtgcgatctcggctcactgcagtctccacctcccaggttcaaccaattctcttgcctcagcctcccgagtagctgggattacaggaaccctccaccatgcctggctaatttttgtatttttagtagagaggaggtttcaccatgttggccaggctagtctcgaactcctgacctcaagtgatctgcctgcctcggcctcccaaagtgttgggattacaggcatgagccactgcacctggccttgttgtttttttgagacagggtcacccatgctggaatgcagtggtaccatcatagcccactgcatcctagaactgtgctcaatcgatcctcccacttcagcctcccaagtagctggggccgaaagcacgtgccgccaggtctggttttgtttgtttgtttttgtagagatggggtctctatgttgcccaggctggtctcaaactcctgcccttaagcaatcctcccacattggcttcccaaagcatgggaattacaggcatgagccacactacaccggcccaacttttgtttcagtggagccccttctctcctccacagctcctcttcacactcacccaccccctcagctgagggacacttcctctttgggatcctactcatgcctcgaacatcctgttctcacccacacctccccatcaaacgcccccagtactgacctggattgaccaaggagcctgttcattagctttggctcactgatcccagaaaagaagccccctctaattaaacacgcacgaaaaccccagaacagaggcaaaaagcattgatgggaaagaactgtatcttctggaaagtaccaatatgacaatgaatccattccatgctgtagttaacaagatgcgggctataatggagattacaagctaactctcaaaaccaaaaaaagaaataattcattgaaaggttttttttttgaagggaaggcatttttttcctctgcaaatttgtatgcaatagtttacatttaactttccagcatgattctagagagtcaatttttggaaaaatgaacacatttaaaaaaaaatgcagccaggcgcagtggctcatgcctgtaatcccagcactttgggaggccgagacgggtgaatcacgaggtcaggagatcgagaccatcctggctaacatggtgaaaacccgtctctagtaaaaatacaaaaaattagccaggcgtggtggcgggcgcctgcagtcccagctactcgggagactgaggcaggagaatggcgtgaatccgggaggcggagcttgcagtgagccgagatcaaaccactgcactccagtctgggcgacagagcgagactctgtctcaaaaaaaaaaaaaaaaatgcttgtaggtagtgtggtttgaattgtgtcctccaaggagatttgttaaagctgggcacgtgtgaatttaaccttatttagaaacagagtctttgcagttgtaaccaagttaagatgaggttatcctggattaaagtgtgatatgatccaatgattgctggccttctaagaaggtcatgcatggcctgacgtggtggcttatgcctgtgtcccatctactcaggaggctgaggcgggaggattatttgaacccaggaggtcctggctgcagtaagctatgatctcaccattgcactccagcctgggccacagagcaagacactatctctgaaaaacaaaacaacagaaagaaaagaaacaaaaagccggccaggtgcagtggctcatgcctgtaatcccagcactttgggaggtgaaggtgggcggatcacaagatcaggagttcgagaccagcctggccaacatggcgaaacctgtctctactaaaaatacaaaaaaaaatgagccgggcatggtggctcgtgcctgtaatcgtagctactcaggaggctgagccaggagaatcccttgaacccaggaggtggagcttgcagtgagccgagatcgcgccactgcactccagcctggatgacagagcaagactctgtctcaaaaaaaaaaaaaaaaaaaaaaagcccttccccacactgaaatacactcaaattattattattattattattattattattattattattattttgagacagagtctcgctctgtcgcccaggctggagtccagtggcgcgatcttggctcactgtaagctccacctcctgggttcacgccattctcctgcctcagcctcccaagtagctgggactacaggcgcgcctgccaccacacctggctaatttttttgtatttttagtagaaatggggtttcaacatgttagcaaggatggtctcgatctcctgaactcgtgatccacccgcctcagcttcccaaagtgctgggattacaggcatgagccaccgcacccggcctcaaattatttttaatttttatttttcttcagacaagagtctcactctgtcacccaggctggagtgcagtggtacaatcacagctcacagctcactccagcattgaactcctggtctcaagcaatgctcccacagcctcccagagtgctgggattacaggtatgagccatggggcttagccgcaaaggctttttttggggtaggtcgggggctgatgtacaactgaatgcacaggaaaggcctttctaagaataaaataaacataaaagtcaccaaagggctgggcatggtggcccaagcctgtaatcccagcactttgggaggctgaggcaggtggatcacctgaggtcaggagttcgaaaccaccctgaccaaaatggtgaactctgtctctactaaaaatgcaaaaattagctgggcatggtggtgcacgcctataatctcagctactcgggaggctgaagcaggagaatctcttgaatccaggaggcagaggctgcaatgagccaagatcacaccactgcactccagcctgggtgacagagcaagactccatctcaaaaaacaacaacaacaaaaaaaaaaaatggaggaagaagattgaagctcacagaataagaagtaatttctttaatactaaaaagagcttctatatatattttaccacagtaaaagtaaagaggctctataaatcaataacaaaaaggctgtcgcctgcagaaaaacaaacaaacaaacaaaaaaaaaacgtttccagggaaagactagaggtccacgtttaaaaatgttttattttaaaggccagacatggtggctcatgggaggctgaggcgggtgaatcacccgaggtcaggagttcgagactagcctggccaacatggtaaatccctgtctctactaaaaatagaaaaaattagctaagcatggtggcgggcacccgtaatcccagctacttgggaggctgaggcaggagaatctcttgaacccggcaggtggaggttgcagtaaactgagatcacaccattgcactccagcctgggtgacagagcaagactccatctcaaaaaaaaaaaaaagttttactttagagacagtgtcttgctctgttgcccagtctagagggcactggtgcaatcatagctcactgcagctgcaaactcctgactcaagtgatcgtcctccctgagcctcctgagtagctgagactacaggcatgagccaccacgtctggacaagatccacttacaaatgtgtatatagaaagacagaaccaggctgggcacagtggctcacacctgtaatcccagcgctttgggaggctgaggcaggtggatcacaaggtcaggagatcgagaccatcttggctaacacggtgaaaccccgtctctactaaaaaaaaaaaatacaaaaaagtagctgggtgtggtggcaggcgcctgtagtcccagctactcgggacgctgaggcaggagaatggcgtgaacctgggaggcggagcttgcagtgagctgagatcgcgccactgctctccagcagcctggacgagagtgcgagactccgtctccaaaaaaaagaaagacagaacctaactatttcccaggctcatctcaaactcctgaccttaagccatcctctggccttgacctcccaaagtgctggaattacaggcatgagccaccgtgcctggctctgagatccagtttttaaacacagagatgttcaacctcactcgaaataataaaaatgcaggccaggcgcggtggctcatgcctgtaatcccagcagtttggaagaccgaggtgggcagatcacctgaggtcaggagttcaagaccatcctggccaacatggtgaaaccccgtctctactaaaaatataaaaattatccgggcatggtggcaggcgcctgtggtgccagctacttgggaggctgaggcaggagaatcgcttgaaccaggcaggtggaggttgcagcgagccgagatcacgccattgcaccccagcctgggggacaagagagagacttcgtctcaaaaaaataaataaataaataaaataaaaaataaaaatgcaaatgagaactacatacttttaaacctctcagttagcaaagattagaatgtttgataacatgtggaggatgagtcctttgtggagaaacctttggcaatagttatccacgatacacctgctcacaccctttgacaagtaattccacttctaggaatttactgatgagatctcttcatgctgggttgacatatgacctctacggcaggttattcaattcatcgttgcttggatcaaaaacaaccgcctagaccaggcgtggtggctcaggtctgtaatcccagcattttgggaggctgaggcggacagaccatctgaggtcaggagttcgagaccagcctgaccaacatggcaaaaccccgtctctactaaaaccacaataattagccgggcttggtggcaggcacctatgatcccacctactggggaggctgagtcgggagaattacttgaactggggaggcagaggttgcagtgagccgagatcgtgccactgcactccagcctgggtgacaagagcaagactctgtctccaaaaatgcaaccaaacaacaacaacaaacaacgaaaatcgcctagtccatcaataggaaactgataagcaaagtctggctcaaccgtggcatcctatgtagccgctaaaaagaacaatatggggacaggtgcactgcctcccacctgtaatcacagcactttgggaggccaaagtgggaggctcacttgaggccacaggtttgagaccagcctgggcaacacagtgagaccccatctctacaaaactttaaaaaattagctggccatgatagtgcacactgtagtcccagctacccaggaggctgaggtgggaggatcacttgagcccaggaggtcgaggctgcagtgagctatgatcacaccactgcactccagcctgggcgaaagaatgagaccctatctctgaaagaaaagaaaaagaaaaacaaaacgaaacagaaaaagagcaaagtggttcccaaagtatgcatatatcaaaagatcacactgtacctggtaagtatatacaattaatatttgtcaaataaaagaagaacaagatggtgagaactgctgaactctgtgaatggatcaaaaaccttcgacttgaaaacttgaaataggcaaactggatggtatgaaaattatatctctaaagctgttaccaagcaacacaaagtaaaacactcagtttcccaagaaagaaaaaggcaggaaggagacccccatctctacagaaaataaataaatacataaatgagctaggtgtagtggtgcatgcctgtagtcccagctattctagaggctgaggcaggaggatcacttgagcccaggagttgtggaggcttctgtgagctatgattgtgccactgccctccagcctgggtgacagagggagatcctgtctcaaaaaaagaggccgggcgcggcggctcacaccagtaatcccagcactttgggaggcggaggtgggtggatcacaaggtcaggagatcgagaccatcctggctaacacagtgaaactccgtctctactaaaaatacaaacaattagctgggcgtggtggtggacgcctgtagtcccagctactcgggaggctgaggcaggagaatggcgtgaacctgggaggcagagcttgcagtgagccgagatcacgccactgcactccagcctggcgacagagtgagactccgtctcaaaaaaaaaaaaaaagcaagcaagaaagagggagatagagagggaaggaaggcaggaaggaaggacaaaaagaaggaaagaaagaaaacaggaattcagagggaaagggtggggagggaggtgagggataaaagaccatatatcggccaggcgcggttgctcctgcctgtaatcccaacactttgggaggccgaggcgggtggatcacctgaggttgggagttcaacaccagcctgaccaacatggagaaaccccgtctctactaaaaatacaaaaaaaattagccaggtgtggtggcgcttgcctgtaatcccagctactcaggaggctgaggtaggagaatcacttgagccccggaggcggaggttgcagtgagcagagatggcgccactgtactccagcctgggcaacaagagtgaaaccccatctcaaaacacacacacacacatatcgggtacagtgtatactgctcaggtgacgggtgcaccaaagtctcagaaatcaccactaatcaattctttagtggttatttggccatgtagccaaaaaccacctgtaccccaaaaactattgaaatgttttttagaaaggatattttgacacaaagagaaaaaaacccaactgcttccagggttaccctaaagtcctccccatcgagtctaggagaggggatggtgtcttaaataggcgagtgctggcacaggggcgcttgtggtagctgtgtgaccttgggcaagtcatctcacctcttggtgttgtacttgagcgagttagagaaaacgccacactttgagacgaattaagagtccgtttatttagctggcggccaagagacggctaacgtttaaagttttcttggccttgaagaagggactagattttcttttatactttggtttagaaaggggagggggggtctagttaaaacaattttacagaagtaaagtaggcaaaaaagctaaaaggataaatggttataggaaagtaaacagttctaggtgcaggggctttaagactattgcaaggtgatagacgcggggctttgggcgttatcaatcagacgaattcctgggaactgcagatattgctcgccccagtatcttatcgattaattgcattcttggatgtgctgggagtcagcttgcacaagttaagtctttgaggaagaggctgctagtgaaagagccaagatggagtctgtctggctctcttagctaagggagagtcaattcaggtggaaacaaggctaggtgattaaaggaaagggagagtctaaaaacagggttagtaaaaacaaggttgggcattacattggtagggtgaccaagcgtcatggtttgcttgggactgtcctgacattagccctaaaaattccatgtcatgcgcatccatgtgaagagaccgccaaacaggctttgtgtgagcagtaaagcttttcaatcacctgggtgcaggcgggctgagtccaaaaaaggagtcagcgaaggaagatggggtgaggctgttttataggatttgggtaggtagtggaaaactacagtcaaaggggtttgttctctggtaggcaggggcggaggtcacaaggtgctcagtgggggagcttctgagccaggagaaggaatttcacaaggtaatgtcatcagttaaggcaggaaccaggcattttcacttcttttgtgattcttcagttgcttcaggccatctagaaatacacgtgcaggcttggactcggaggcttgacattctgtgttgcaggaaattcctcagtccccagaacgtgggatagctggtgacaatgcagctggctccaggttttgtttttgtggttttgtccttttttttttttttttttttgagatggagtctcactttgtcacccaggctggagggcagtggtgcgatctcactgcaacctccgcctcctgggttcaagcgattctcctgcctcagcctcctgggtagctgggattacaggcatgagtcaccgtgcccggccaaggtttttcttctttgctgaatggagataatggcaggcagagctaggttaaaagcacctcctcccagttcatccaccttgtggctgtgtggctttgtgtagcttcctgcaccactctgggctcatctctaaaatgggatttttctttttttttttttctttgagacagggtctcgctctattacccgggctggagtgcagtggcgcaatcatggctcactgcagcctcgacctcctggactcaagtaatcctcctgactcagccttccaagtagctaggactacaggtacatgccagctaattcttaaaattctttaggctgggcgtggtggctcatgcctgtaatcccagaactttgggaggcgggcggactacctgaggtcaggagtttgagaccagcctggccaacatggtgaaaccccatctctactaaaaatacaaaaattagccaggcatggtggtgcacccctgtgatcccagctgctcctgaggcagtagaatcgcttgaacccaggaggcagaggttgcactccagcctgggtaaccaagtgagactccgtttcaaaaaagaaaaaaatgaaaaacctcttgggctcaagcgatcttcccaccttggcctcccaaagtgctgggactacaaggcttgagccatcacagctggcctaaaatgggaagtttaagtgcacctgcttcacagagagggccggtcatatccatctttttacatcactttgcacaggccctggcactgaccaggttgtcactgctccaggacaaggtttgccactgccctctcctcacccagggttctagggctgtgattccactcaaccactaggaacctcaggtgggtgcagggcctggcttggcaggagacatcatcaatgagaaccggttagcctgcttgctggactcatgctgggttgccaagtgccctgggaagctgggcaggggacaggtggcaggtgggagagatcaggtgccaagtacctattcgggtagatgaggatatttaggcatggagcaggggggacccttggagaaaggcgagcagaggaggtggccctcactgccaccactagcctcccctcatcgcctgagttctggtaattttacctctaaagccccctggaatccctccctcttctcctattcatcacccccgaaccaggccccaggtcctcccatccagctgcccacggtagagtgacaccttcccagcctcccactctgttctttcctaattttaagtccaattgttggccaggtgcattgactcatgcccataatcccttgagggatcactcgaggtcaggagttcaagaccagcctctccaacatggtgaaaccccgtctctacaaaaaatacaaaaattagccgggcgtggtggtgtgcgcctgtaatcccagctactcgggaggccaaggcaggagaatcacttgaacctaggaggcagaggttgcagtgagctgagatcgtgccactgcactccagcctggatgacagagtgagactccatctcaaaataaatcagtaagtccattggtgcctctccctggagagaacccaggagggcttattgtggctgggccagccctgctgtcctcccaggaaacttcctctcagtatagttcccccacccgctcatttctcagggctcagatgtcacctcttccaggaagcctgccttgaacacccactcactctcaagcttggggtccggcctgagctccatggtcagggatcggggtggaaggtgaggacaggcgagaagctgcccaactgcagaaggtgcagcctgggtcccttcctgcctggctgaccccaggtgtcttcctccagcttcccaacctttgccccatgtggtaccttccacctgaaatctctctccagccctggcctgcccaggtcctcttttgagctcccctactccacttctccggagtcctggggcttctccactggggcgtggactccaccattccaccatgtatcctgtattatattatcgttattgtttgtagataccggggtctcactatgttgcccaggctggtgtctcttttttttttttttaattgagacaggatctcactctgttgcccaggctggagttcagtggcatgatcatagttcacctcagccttgacttctgggctcaagtgatcctcccacttcagccttctgagtagctgggactataggagcacaccaccacgcttggctaatttttgtatttttggtagagatggggctcttgccatgttaccgaggcttgtctcaaactcctgagctccagcaatccactcacctcagccttccaaagtgctaggattacaggtgtgagcgaccaagcccggtcatatattattattaatacaaacaaatgccatgctctgagcaccctggagtatgcgacatgtgatattcaataactccctagtcacaacaactgagaagagttgctttattatctttcttttccaggtgtgcaaacaagctcttggagggaaggagaggagaaaataaacaggtgaatatggtgggggtggggtaaagcaggcaatggaggaaggaggaggggactgaggctcagggagaagtatgtatgcatttgaaaagggaaagaggctggggcacagtggctcttgcctgtaatcccagcaccttggaaagcggaggcggaaggatcacttgagcctaagcgttccagaccagcctgggcaacatagcaagaccccacctctaccaaagtttttttttttgttttttttaattgagacagagtcttgctctgtcacccaggctggagtgcagcggcacgattttgactcactgcaacctccgcctcctgggttcaagtgattctcctgcctcagactctcgagtagctgggattacaggtgcgcaacaccatgcccagctaactttggtatttttagtagagaaggggtttcgccatattggccaggctggtctcgaactcctgacctcacgtgatccacctgcctcggcctcccaaagtgctgggattacaggcatgagccaccacaccctgcctaccaaagtttttttatttaaaacaaaaaaaaattagccgggcatggtggcaggcatctatagtcctagctcctctggaggctgaggtgagaggactgcttgagccctggagtcccaggctgcaatgagctgggatcatgacattccattctagcctgggcaacagagtgagactcccatctttaacgaaattttttttgatagagtctcactctgttgtccaggctggagtgcagtggcacgatctccacgcactgcaacctctgcctcctgggttcacgtaattctactccaggctaatttttgtgtttttagtagagatgggattttgccacgttggccaggctggtctcaaactcctgacctcaggtgatccacccgcctcagcctcccaaagtgctgggattacaggtgtgagccaccgcacccagcctctaacagatttttttaaaaaaagaaaagagaaggtcgggcatgctggctcacgcctgtaatcccagcactttgggaagccaaggctggtggatcacgaggtcaggagtttgagatcagtctggccaacattgtgaaacccccgtctctccaaaaaaaaaaatatatatatatataaattagccgggtgttgtgggcgcctgtaatcctagctactcgggaggctgaggcaggagaatcgaatgaaaccaggatgcagaagttgcagtgagccgagatcatgccattgcagtccagcccgggccacaatgcaagactccgtctcaaaaaaaaaaaaagaaaaagaaaaaagaaaagagaaacagtgtagcagagggaaggccaagtgcaaacgccaggagtctgaacttggagggacaggttcttccacacttgcaacagaggtctcctgcctccctgaccgccccgccccccgcgcccctgtctgtgtgaggaaatcaaatctcagcttgcctagggccctgtggcagggaggccccaacttcaccccatgggtcttgggtctgctgagctgagtcagagaaaggtttattatccccattttacagaggcttattgtccaaaggcgaagccacttgcccagagtacatgcggtgggccagcgactatgaaaacccctggggctgtcctctgttcagggatcgcccaggctccctgcccctgcgcgctgctgagactgggtcattttcggttctaccaggcaagcgggggacccagcccccactgctgctgccctcagccaaaaccagggctgcgccaccacccacccggcctatctcccatcttatctccccagctctgtcgcctgacccctgcaccccaccaaatcgcagcctttgcccggtgccctcaccgcctcggttggcccccgcgcgcgcctcgggcgaacccctggactggccctccaacagggccccagactcggggtacccagggtggccgctgaggcctggagaaatctgggcctcccctgtgcaccatccaactgcgcgccccagaggctcagggcgccccgggagtgtgggggtgtggacagatgagcagagccagagcatctcgggcagaagaggggacctgggagggggccggggagacagacagcgaacaggggtgaagccggggccggacggagcgcgcagcggacaatactgggttcaaaggggagagataaggcgcagactagaaacgctaggctggacccgggccaggcgcgccgcggggcagagatgggcggagcgggaacgggggcgggggcgagaatgggggggcggggacgggggcggggatggggtgcgggtgcggggtcgggggccagggagaggcctagttgcgtcgaggggggcaagcgcctggaggacccggcgcccgctccaggccctgcccctccaagtcccccgccccgcgccaggccccgcctctccagggccccagccccgcgccaggccccaccgttccggggcgcgtgccccgcccaggccccgcccccacggccccgccccgggctccccccactcaagccttttttcccctgctgggggccgaggcccggccaggagcagagtccggctgcctggggcgggcggcgcgtgtctgcagctgctccgggtagcccgctaggcgcgccgtccccagccccgccgccggccctcggtgcgcccggccgcctgcacccccaggtaagcgagcaccccgcgccgcgaacaccgccccgaacgccaccctcacggcggtccccggccccgcctccgcggccatggcggccccagcccggcccccactcgcagctgggctccagcccccatcaccccgccggggactgtccccctcggggcttcccatcatggccgtctccccgagctatccgcgctcccccacgagggccggggcgcaacgggtgcccgaggacgcggctgtgaaacgggctggagcgagtaggggcgatcctggcctcgtgacgcgggggaatccggatgtgtgagccgggggagcgccccgtttccccgacgtgccagggctggggacgcagctggggccctggcctcggagtccgcagcccggccgcgtagacggcttctgagaaccgcttaaacacgtcattccaagcccgagctaacccatcaggcggccggggtgaggtggaggtgcccaggcggggataatgtcatttggcctggttggaccagccagcgagggctttttaggcccagggcctagccgggagtgtgtgcggagcagaaaagaggccagcctggctgaaacgcggagagggagggtctgaggtggagagaggttggccggggcctgggaagcggcgaggagagtgtggaacccgttctcggggcggtggggaccagggaggcttggaacagcaggtgcatggcgtgatcggattgtgtcttaagaacatcccgtagccgctgtgggtaggagagatggggatacttggaagggggcttctggcttgacctggctggaaggtgtgataggaagtgggtgaactgaaaattcgctttggcagagtaacatcgtctaattctgtctgtttgcaagtggagcgtgggggaccgatgtttctcctgggtagttaggagtatatagaagaggctttcattgctgggttgggagacttgaggagaagctgctctgggggacacaggaaggtgggcagggggagaggctgttgtggtttgcaaaacctaccagatgggggaatgctcccatcgactccagtctgagctcaggcaaggtctcaggcatctgagcgcagaggccagggtgaccccactggggcgacctgggtctgttatatggggatagggttcctggactgtggaattgtctttgaagccctcggcctcccccagcctcaaatgggtctgccttccaggagcagctgctgtgaataaacacagaagtggagctgggggactgattagaagcctcattcagtgcacctgggccccagcaggcccagccaggcgtggaggaagaggcattgaggactttccttacctgtttttccagctcacccactgccagcagaggtactttgagcctggggtgtggggggtggggggcggccttggtcgttgaactggctgtagggcccccagggaaaggtttctgagcttcagtttacccatctgtaaaatgggtcagtagtatctgagcctgggagtgttcatggatcgatgaaagccgaggctaggcagatctcggtggcagccacacccctaaggaaccggagagggttctaacgcccggtgggagttcagggggatgtatgggcttccatttctcctctgagaaattcacaacagtgtccacctcctgacccagggctgtctgcaggttgaataaagcggttgacccagtgcgtggcacagaatgtcttggctcaggagccactgggatgcctgtagttggcagcagaagtgggcccaggttccctcctcccacccgtgggatggcacagaaaggcaggtgccttgggagctcgctgccctgtccccttctctgagcaccacaagcttctccctttccgactggctgggcttgagcctgaccaccccccagccctgtcctgccactttgagttgagggcctccgggctactgacttcaccacttcctgcttcagtttctccacctgtaaaatgggataatagcagtcatgacctataggtaaagagctgaacacagtgcctggctggttgtgaatacgtgctaaacaggctattaaaatatcacgagaatatcacagagctggaggctattaaaatatcacggaggggctgggcgtggtggctcacgcctgtaatcccagcactttgggaagctgaggcaggcagatcacctaaggtcaggagttcgagagcagcctggccaacatggtgaaaccccatctctactagaaatacaaaaattagccgggcgtggtggcatgtacctgtaatctcagctgcatgggagactgaggcaggagaatctcttgaacctgggaggcagaatttgcagtgagccgagatcgcgccactgcactccagcctgggcaacaaagtgagactatctccaaaaaaaaaaaaaaaaaaaaaaattcagagtcatgcctggggtcagggggagtccagaggagtcacctgactcagcctaaggaggagtcagggaaggcctcctggaggaggtgacagttggctgggtcgctaagggtaaggaggagttaaccaggccaagagaccagtgggcaaattgcagaggagagaaactgccagggtgcttggatgaaacaaccacaaagccagggttgtaagatccagaagaggggagaggaagaagggcagagccagcctgccagccttgaacaagcatttggcattatttagagctcagggaacagactgcaggggtcgaaggcaggagcctggagaccaggatggaagggactgcaccaggccaggggagtaatggtggggctggaccaggtgaaggcgtggacgggtgagacttgggtggatcttggagagatatggagaggccgggggagggagcagctgctcatgggggagaagctttaggtgtaagtcagcaatctgttctcagcatctggaaattgccatgctgctagacacccaggtggtacggcgtaggatgggctttaaagcaagctgggagcttgggagacagcagaaagagggcagaaggaaaaccaggagtgggtggcaagctgggagccaagggagctggggctgtcataggaggaaagggtcttgaaacccctgtttgataattcagtagcaggcatcttactgtttttttaattattattttttttattttttggaatggagtttcgttcttgtcgcccaggctggagtgcaatggtgcgatctcggcccactgcaacctccacctcccgggttcaagcaattctcctgcctcagcctcctgagtagctgggattacaggtgcgaaccaccacacctggctaatttttatattattagtagagatgaaggggggtgggtttcaccatgttggccaggctggtctcgaactcctgacctcaggtgatgcacctgcctcggcctcccaaagtgctgggattacaggtgtgagccactgcgcccagcccgtctcactttcttttgtggctgctctttaccaaccctgttctgttccccatgcctttcagtacaagctcttttctttgcttttctttcttgtttttgttttgttttttcaagacaagttctggctctgttgcccaggctggggtgcagtggtgcgatcttcgcccactgcaacctccacctcccaagtttaagcaatcagcctgggactacaggcataagccaccacacctggctaatttttgcatttttttgtagtgattttgtagagttttgccagttgcccaggctggtctgaaactattgagctcaaacgcctcagcctcctaaagtactgggattacaggcatgagccactgcactcggcctctttctttctttcaaaggcagaatcttgctctgtcgctcaggttggagtgcagtggcatgatcataactcactgcagcctcgacctcctgagctcaacctcagcctcctgagagctgggaccacaggcatgcaccaccaggcctagctaatccttaaaaaaaaattttatacacatggacaggggtcttactatgttgcccgggctggtcttgaactcctggcctcaagcgagcctccagcctcaacctcccaaagcactaggattataggcatgagccactgtgcctggccaagcgcaggcttttctttgccatccttgaataggcccctcagacccatcatggctctgaccagagtagcatagagaggcccggcgcggtggctcacgcctgtaatcccagcactttgagaggccgaggcgggcagatcacctgaggtcaggagttcgagaccagcctggccaatatagtgaaaccccgtctctactaaaaatataaaaattaaccctgtgtggtggcatgctcctgtaatcccagctacttgggaggttgagacaggagaattgcttgaacccaggaggcagaggttgcagtgagccaagatcgcactactgcactactgcactccagcctgggtgacagagcaagacactgtctcaaaaacaaacaaacaaaaaacagagtagcatagaagagaccttcccctccctgagtctggactttatacctttgttaataggatgctgtcacacacacacacactgaaccgcctggagctcagctcagctttccctccctaccccctcctggactcccagagacagattttaatccagggtcccatgacactgtgtctgaagagtgatcatttcctatcagctatgccctggggaccccttctgccctgtgcctggccccactttcctcccacccctgtctgtctgtctgtctgtcatttgttcattcagcacagacttaggaagtgtctgcagtgggaggcactggggacagacagccacaggaagccttacggagctgatgtccccgcagggagaaggtgatggggacaaggatgaggcttgaaggagcagctagacatctggaggaagagtgctccgggcagaaggcccagcaggtgcaaaggccctgaggctggaacaggcatggtgtgttggaggaatgcaatgaggctggggtggctggagcaaactaagcaaggagtcatagagtagagagaggagtagatgaagagactgaaggtccttgggaacccccagtccaaccacagcataccctggagagtccttgctcaaggggacttgaggagtgaaaggttatgggaccctactgcttttgcacggttactttgtcgtcctgtatgtgcagtggtcacctgtgctggggtgctcgaaccttgaaggctgaggaagctggcaggaggaaggagaggaggactacgcagtggccaagacttctcctcctcccctccacacaatggggctcagctgaactgggagagggaagtagccagggaagggtactgatgagcgtatggaagcagaggagatgaagggcagtggggaggaggtgggaggggaggaggaagaggaaagggaggaagacgagggggaggagagggaggagggggaggaggagaaaaaggaagaggagggggaggagagggaggaggaggaggagaaaaaggaagaggagggggaggacgaggaggaagaagcaacggcagcagccagtgggcaagcagccagagctggatggaggagccaggacgttctcagataggtgatgggggagccctagggatgcagggatggtagcctcgatcaggggcctagaggacaaacagcaaaagccaagcagcagggccaggcgcggtggctcacacctgtgatcccagcactttgggaggccgatgtgggtggatcgcctgaggtcaagagttcgagaccagcgtggccaacatggcgaaaccctgtctctactaaaaatacaaaaattagccaggtgcagcggtgtgtgcctgtagtcccagctactcaggaggctgaggcaggagaattgcttgaaccaggggggcggaggttgcagtgagcagagatcacaccactgcactccagcctgtgcaacagagcaagactctgtctcaaaaaaaaaaaaacaaaaaacaagcagcgggtgtgtctgggggatgggccagcctctagcctgcagtcgctcccttcccaggcaaaagagagagaactcggtcccctctccctgtaccccacaagagcctgggcaccctccccactcccaccacgaacctgggcttcactgggagggaatttagacacttggatgctggagcctagatctgaggttctgttgagccacggcactgtgacccggactgtcccctccatccccgtccaaactgggagggggcatcccttgtccctggcactcctctgtgatctggcaggtgtgatgagccacagcagggacaggggaataggggctgggctttttagggtgatggcacccagacggtaacaggacgggagggaggtggtcctctgggttttgtttctccatctgggatgttggtgagggcaggcataagccacctctctgtgcctcgagtccaggatgcctggccctgcctcagggcctttgcactggctcttccccctttctagaatgttctatcatcagggtttcctccctcacctccctaccttctcagggagggcttcctgacctccctctttaaaattgtagccctgccaggcaccgtggctcacacctgtaatcccagcactttgggagcctgaggtgggcagatcacctgaggccaggagttcaagaccagcctggccaacaaggtgaaaccccgtctctactaaaaatgcaaagattagccaggcgtggtggtgggcgcctgtaatcccagctgcttgggaggctgaggcaggagaatcacttgaacctgggagatggaggttgcagtgagctgagatggtggcactgcattccagcctgggcgacagagagagattttgtcttggaaaaaaaaaaaaaaagaaaattacagcccccactgcctgactcctcattccttttcctgccttatttttctctccacctgacaataacaaaacaaacaaattatcaaaatgcagggccagatcaggtggctcatgcctgtaatcccagcactttgagaggcaagttgggcagatcacttgagcccaggagttcaagaccagcctgggcaacatagcaagaccccatttctgaaaaaaaattaagatatagagtctttgccactccctcatctccaccatgtccagaatattggctccatggagtgaaatttcttgtctactctgttctctgctgggatcccagtgtgtagttggtatgcagtgggcacccgataaatgtgaagtgatgtcagccatcctgggtccttatggctgcagcctgagaggttggacttggggggcggatggcgttgggggtagcgtacctcgggtggcaggtaacaggcaggttctggagacaggcaggcttgggtccaagtcccagactctactccctactttatgactttggatgactccatgcctcactttccccagttgcaaagtacagatgacagagggacctggcacttaacacatgtcagcttcccggggaccttgctggagtctggaaggagctgggggccaatctgaggcctccagagggtcagactctgagacaggacatttatgactttcccacccactcctagaattttccagaaatgtgatgaagagcaaggagacgttactttattttgggcagtcaggacccctctgaaaaggcgacattagggctggggcctgagtgggagtgagtgatgggctgagacaggaattggacttgtttactgccctcccagagacccctcattcagtggggagacagacgtgtctttgggcagttacaaggcagattaaccagggtacaaggaaaacaatcagagacactgaaggcaaggagaggctcgttttttaatttttttttgagacagagtctcgctctgtcgctcaggctggagtgcagtggcgcaatctcggttcactgcaatctccgcctcccgagttcaagcgatcctcctgcatcagcttcctgagtagctgggattacaggtgtccactaccacacctggctaatgtttttttttttttttttgagatggagtctcgctctttcacccaggctggagtgcagtgactccatctcggctcactgcaagctccgcctcccgggttcatgtcattctcctgcctcagcctccccagtagctgggactacaggtgcccaccaccacgcctggctattttttttgtatttttagtagagacggggtttcaccctgttagccaggatggtctcgatctcctgacctcgtgatccgcccgcctcggcctcccaaagtgttgggattacaggcgtgagccaccgcacctggctaatttttgtattcttttgtagagacggggttttgccatgctggccagactggtctcgaactcctgatctcaagtgatctgcccgcctcatcctcccaaagtgctgggatctacatttggccttctttttgtttttgcttttattttgagacagagtctcactctgtcgcccaggttggagtgcagtggtgcaatcttggctcactgcaacctttgcctcccgggttcaagcgattctactgcctcagcctcccaagtaactgggattacaggcacgtgccaccatacccagctaatttttgtatttttagtagagatgaggtttcaccatattggccaggctggtcttgaactcctgacctcaggtgatctgcccaccttggcctcccaaagcactgggattacaggtatgagccactgtgcatgaccaaggagaggctcttgacccaggctgggagtcttcaagacttcctggaggcagccacaggcaagctgcccacttgaaggtttaaccatgccaggcatcagataacggaatgctgaacagtgatttagagggagcggcccaggcaaaggcctggcatccgggaatggcatcggagcaacattcctaaaattgaagcagactctgggaatccacccgtggagaccctaggctgagaacctcggagtcagggtggctgcgggagggcagacagggaggccaggacagggcagtgcgttcggccaggtcacaaaggcctcgaatgccaggtcaggagccatggggagcctccgaggagatcttgagatggggaagggacaggctggtactcagagccactgctgagagagggatggactccatctgtgtgtatcccagaggaggggcggtcctggaccgtcatctgagaggaagtgctttgcctccagttacacaaacacctccggtccttaaagggacgataggtagcctctgcctccccactgggggcccttctctgtgccaacccatccaacccagagggctgatggaagacgtgtgctctgcaggggctctctgtggcttcttgcttcactgggtggatgggtatcaagatggtgacttgaggccgggagccgtggctcatgcctgtaatcccagcactttgggaggccgaggcgggaggatcacttgaggccaggagttcgagaccagcctggccaacgtggtaaaaccccatctctactaaaaatacaaaaattagctgggcatggtggcgggcgcctgtattcccagcgacttgggaggctgaggcaggagaatcacttgaacccaggaggcggaggttgccgtgagcctagatcgtgccattgtactctagcctgggtgacagagcgagacttcatctcccgcaaaaaaaggtggtgacttgatttcacagagaactccagctgcctgagccaccctgcaggataggagcaggctctgaggtccacagtttgctactgtctcaacccactgcccccagctcctctgagacccaggcaggactgcaggcccatgtaggttcagatggatgcctggaggccggacacggtggcttgcacctgtcatcccaacactttgagaggctgaggctcaagtatggcttgaggccaggagttcgagacaagcctgggcaacatagtaagaccctatctctataaaaaatatatattttaaaattagctgggtgagggctgggcacagtggcttatgcctgtaatcccagcactctgggaggccaaggcggatggatcacctgaggtcaggagtttgagaccagcctgaccaacatggtgaaatcccgtctctactaaaaatacaaaaaaattagccaggtgtggtggcacatacctgtaactccagctactcaggaggctgaggcagaaaaatcgcttgaacccgggaggtggaggttgcaatgagctaagactgtgcttctgcactccagcctgggcaacaagagcgaaactctgtttcaaaaaaaaaaaattagctgggtatagtggcatgggtgcctgtagtctcagctattcaggaggctgaggcagggggatcatttgaacccaagagtttgaggctgcagtgagctatgatcatgccactgcactccagcctgggcaacagagtggaatcctgttgtctcttaaaaaaaaaaaatttgttaagtggatacatacctggggaccctggagctccacggctgctgccctcaccctgttgttttcctccctctcggatgatgccatcttagaattccatgcctggaatttgcccaccggctctcctcgccccctcccacccctcggctgtgtgtccccttattcctgcccaagcaggcagttcccagatctaccccagatactcatcccaatctgccacccccaccccttgaagataccctacccggacctcagcacccctccccgaggctcctgtctctgccaccctccaccttcagcctccctctctcttcttttctggagacagcaccatgctctgttacccaggctggagtgcagtggtgcgatctcggctcactacaatctccacctcgcaggttcaagtgattctcttgcctcagcctcctgagcagctgggattacaggcatgtgccaccatgcccaggtaatttttatatttttagtagaaatggggtttcaccatgttggccaggctgatctggaactcctggcctcaggtgatctgcccgcctcggcctcccaaagtactgggaatacaggcatgagccaccgcgtccggctgagcctccctacctgttctgacccagcttccccactctggctgctgtcacctgcaagaggccagccagcctctgagtgacctccagggatgggacaacctccaagggcagcctgtgttgccaggagaactcccagaatcggtccctcccgaaatctctgccgccttcccatggcatcaaggctgagggcttctgttaccactgctgttttgtgtttttttttttgttttttttttgagacggagtctcgctctgtcacccgggctggagtacagtggtgcaacctcggctcactgcaagctctgcctcctgggttcatgccgttctcctgcctcagcctcccgagtagctgggactataggcgcccgccacggtgcctggctaatttttttgtattttttttagtagagacggggtttcaccctgttagccaggatggtctcgatctcctgaccttgtgatctgcccgcctcggcctcccaaagtgctgggattacaggcgtgagccactgtgcccggcctgtgtatttttttttttttttttaaacagagacagggtctcgctatgttgctcaggctggtcttgaactgctaggctcaagcaatcctcccaccccagcctcccaaagtattggaattacaggtgtgagccactgtacctggttctgctgctgtgtccttcaaggcatggtaacagacacttggtaacctccccttgaatctggagtgcccgagggcctgggctggcagccttgccaacatcgggaactggtcaagactgcactttgttttgtgttcattgtatttgttttcacggctagcctctgcacgtgatgccaatgctggcttgctctttcagggagagagggagggagagaaagtgtcttctgaaaataaatgtatttcggtaaacaaacaatgtgagccttttaacttttttttttcttattttttttttttgagacggaatcttgctctgtcacccatgctggagtgcagtggcacgatcttggctcactgtaacctccacctcccaggttcaagcgattctcctgcctcggcctcccaagtagctgggattaccatgcccagctaatttttttgtattattagtagagacgaggcttcaccatgctgaggtcgaactcatgacctcaagtgatccgccctcctcagcctaccaaagtgctgggattacaggcatgagccaccacacccagcctaaaattttattttatatttacttactgacttatttatttttttatgtttttttttttttttttttttttttttgagacagaggcttgctctgtcgcccaggctggagtgcagtggcatgatcgtggctcactgcaagctccgcctcccgggttcacgccattctcctgcctcagcctcccagtagctgggactacaggtgcctgccatcacgcccagctaattttttgtatttttagtagagacggggtttcaccgtattagcaaggatggtctcaatctcctgatctcgtgatccacccgcctcagcctcccaaagtgctgggattacaggcgtaagccaccgcgcccggccctatttatttttttttgagatggagtctcgctctgtcacccagactggagtgcagtggcgcaatctcggatcactgcaacctcggcctcccgggttcaaacgattctcctgtctcagcctcctgagtagctgggattacaggcacccaccatcatgcccagctaatttttgtatttttttgtagagatggggtttcaccatgttggccaggctggtcttgaactcctgacctcaggtgatcctcttgcttcagcctccgagaagtgctgggattacaggcgtgagtcactgtgcctggccagcatgagccttttttatttatttatttttgtttttgagacggagttttgctcttgttgcccaggctagagtacaatggtgtgatcttggctcacggcaacctccgcctcctgggttcaagcaattctcctgcttcagcctcccgagtagctgggattacaggcatgcgccaccacacctggctaattttgtatttttggtagagacggggtttctccatgttggtcaggcggatcttgaactcctgacctcagatgatccacccgcctcggcctcccaaaatgctgagattacaggtgtcagccactgtgcctggccagcacgagccttttgaaggagagcagtgagtgcctcacagcacaggtggaagacggacaggtggccatgagggtggtgggaaagcctgaaactggagcttggttgttctctggaatcctgggtgcccggtctcagttgagccttttactcatttgtgcagtcggtggacagtttcctgctacccgttgtgtgtcaggtgctgggaaaatggagaggtcctaatcaccaggatatgggggaagatagttgtccctggctgggtgcagtggctcacatctatagtcccagcactttgggaggttgaggtgggaggatcacttgaggccaggagtttgagaccagcctgggcaacatagggaaaccctgtctctgccaaaaaaaaaaattagctgggcatggcggcatgtacctgtaatcccagcactttgggatcctgttgaggcatcaggatcacttgaacccaggagtttgagactagcctgggaaacatagtgagacctggtctctacaaaaaaattttcttttttaattggccgggccgggtgcagtggttcatgcctgtaatcccagcactttgggaggctgagaggtgggaggatcacttgagctcaggagtccaagaccagcctgaccaacatgttgaaaccctgtctctactaaaaaaatacaaaagtagctgggcatggttgcacacgcctgtaatcccagctacttgtgagactgaggcaggagaatcacttgaacctgggaggcggaggttgcagggagctaagattgcaccattgtgctccagcctaggcaacaagagagaaactctgtctaaaaaaacaaagacaaaattagccgggcgtggcagtgcacgcctataatcccagctactcagaaagctgaggtgggaggatcacttgagcctgggaggtcgaaactgcagtgaaccttgatcatgccactgcactccagcctgggcaacaaagcaagaccctgtctcaaaaacaaaaacacaaaaaacagttgcccgtggctgggtgcagtggctcatgcctgtaatcccagcactttgggagaccgaggcgggcggatcatttgaaatcaggagttcgagaccagcctgaccaacatggtaaaaccccgtctctactaaaaatacaaaaaaaattagccgggcatcatggtgcgtgtctgtagtcccagatacttgggaggctgaggcaggagaattgcttgaacctgggaggtggagggtgcagtgagctgagatcacaccactgcactccatccagcctgggtgacagcaagactccgtctttaaaaaaaaaaaaaaaaaaaaaaggccaggcacggtggcccatgcctgtaatcccagcactttgggaggccaaggcgggcggatcacgaggtcaggggttcgagaccagcctgaccaacatggtgaaaccctgtctctactaaaaatacaataattagccgggtgtggtggcacgcgcttgtaatcccagctactcaggaggctgaggcaggagaatcgcttgaacctgggaggcggagattgcggtgagtagagattgtgccactgcactccagcctgggtgacagagcgagactccatcgcaaaaaaaaaaaaaaaaaaattgttgccccaaaagttctgagaaagatgaggtaggagaacccaggaggggagtgtcccctaacccagcccagcggcgattggtcggccctcctagaggaagtgtctgttgaacagagtcgtgaagagctgggaggaatttggcaggctgaagggagggcattactggtagggaatggcatgtgccaaggtccatttgctggggagcaccgtgccaggccagtgggagcacttgcaggattcaaagctgcgggtctgatttgcaggcaagaagaaagacctgggtgctgagtggggaggcggccaccatgattcaatcaagaaatgggagccgtggaaatcgggcagaggagggactgtcgcgggaaagacggacgtaatcgtagggcttaatgaggagctgagtgccgagagggtgtgagatggagtcagagatgactctcagaattttgtccctgaagactgggtggagggtgggatcttggccaagaagccaggggaggaggaaagaaggctctgtgggagatgacttcagccctgacgtgtctggacagcgcgcagacgggaggtattggggcagcaggtttggctttggcgggatggtgacctgggagcagcagaaatctggaaactgacagcatggacgtgctggccgcagcttccaggcaggtgaatttcccagggagagcagatggtgtgaggggatccaggactggcataatttagggagaaaaaccagcacaaattagagaaaacagcagagaggaggggaaccaggaggtcatgattctgggaaggagggatggacaaggggaggagatgctactagagggtcccagtttcatgcttagaggaattgaccacttgggattggccatgggaggctgcgactgatggccaaaagccaaaggctggagtagtagggtggggacagagaggtggcagtggacagtgaatagaagcaggaaggcaagtcctgttttccaataattcttttttttttttttttttttgagacaaagtctcactcttggccccccaggctggagtgcgcaatggagcgatctcggctaactgcaacctccgcctcccgggttcaagcgattctcctgcctcagcctctcgagtggctgggattacaggtgcccgccaccaagcccagctaatttttgtatttttagtagagatggggtttctccatgttggccaggctggtctcgaactcctgacctcaggtgatccacccacctccgcctcccaaagtgctgggattataggcgtgagccaccgtacccggccgtgttttctgataattctgaggctactgctgatgagctgagtgtctctgggcccatgtctgtctggaatgcctggtgccacagagctggggtcaaattactgcctggccatttgtcagctatgtgaccctgtgtaggtgatccggcatgtctccaagactcagtttgttcatctgtgaaatgagaatggtgaccgggcaaggtgactcacgcctgtaattccagcactttgggaggccaaggcgggcggatcatttaagtacaggagttcaagaccagcttggccaacatggtgaaactccgtctctactaaaaaatgcaaaaattagccaggtgtggtggcgcatgcttataatcccagctacttgggaggctgagacgggagaatcgcttgaatccgggaggcagaggttgcagtgagccgaagtcacaccactgcactccactccagcctgagtgacagagcaagactctgtcttaaaaaaaaagaatggtaacagtatcttcctcagggtgtgactgatatttccaatgcagggaggtaagggcttgtccctgggtaagcgtctgatggataatacctgggatggtaccaacgctattggtcactggtgccttaggataatcctggtgtgggtgtgggcaaaagcctgctctcccacagaacagtctggctttgcacctgcttggccctatatgaatctacctccatgtatgctgtcaccagggagcagcacaggggcccagccaacagctggtgggaggaggggcagatgttagagcaggttgagtgaaggaaggatcccatcagagcataacccagatttcacaattatctccaccctggaaggtgggcagggacatcaccaaaggggctgatcttgatggaaaattggtttcttggcccgtgtagtggctcatgcctgtaatcccagcactttggaaggccgacgtgggcagattgcttgagcaaaagagttcaagaccagactgggcacagtggctcacgcctgtaatcctagcactttgggaggctgaggcaggcggattgcctgaggtcaagagttcgagaccagcctggccaacatgctgaaaccccgtctctactaaaaacacaaaaattaggccaggcgcagtggctcacacctgtaatcccagcactttgggaggccgaggcagacggatcacctgaggtcaggagttcgagaccagcctgaccaacatggagaaaccctgtctctactaaaaatacaaaatcaactggatgtggtggtgcatgcctgtagtcccagctacttgggatgctgaggcaggagaattgcttaaacctgggaggttgatgttgccgtgagccaagattgcaccattgcactccagcctgggcaacaagagcgaaactgtctcaaaaaaaagagaattggtttcttaagtagtgaggtgggggtagagggctcattccctaccaaaaatgccccctctcctgtatcaaccctgtctcctgtatcaaacacaccttcagtggaaatcttttcattttcatgtactataattttctatttaaaaagtcacccttaatatatatacatacactggaatatgattcaggttttttttcttctttttccttgagacagagtctcactctgtcacccaggctggagtgcagtggtgcgatctcggctcactgcaacctctgccttgatcttggctcaagcaattctcatgcctcagccttccaagtatctgggacttacttggaagtaagctggccaccacgcctagctaatttttgcatttttagtggagatggggtttcaccatgttgcccaggctggtctcgaactcctgatcgcaaatgatccacccgtctcagcctcccaaagtgctcggcttacaggcatgagtcactgcacccagcctgattcagccttaaaagggaaggatgtaacatgtcatgtgggtgaaccttgaggacattatggtacatgaaatcagccagtcacaaaaggggagatactgtgtgattccacttacatgaggcccctagcgtcaccagattcacacagagagaaagtagaatggtgggtgccaaaggagagggaacagggaattattgattattaggcatggattttcaggtttttgttgctgttgttttgagacggagtctcactatgttgctgggctggaatgcagtggcgtgatctcggctcaccgcaacctctgcctcctgggttcaagcgattctcctacctcagcctcccgagtagctgggattacaggcgcccgccaccacgcccagacaatttttgtatttttagtagagacggggtttcaccatgttggccaggatggtctcgatctcttgacctcatgatccgtccatttcggcctcccaaagtgctgagatgacaggtgtgagctactgtgccctgccagagtctcacgatccgtccgcctcggcctcccaaagtgccgagatgacaggtgtgagccaacgtgccctgccagagtttcagttttacaacatgaaagaattctggagctggatggtggttatggttacacaaccatgtgaaatatttaatgccactgaactgtataattaaacacgattaatggtaaatgttgagtattttaccacaattaaaaaaaatttttaaatatgtcagccgagcatggtggctcacacctataatcccagcactttgggaggcctaagtgggcagatcacctgaggccagtagtttgagaccagcctggccagcatggcgaaaccccatctctactaaaaatataaaaaattagctgggtgtggtgtaggtgcctgtaatcccagctacgcagcaggctgaggcaggagaattgcttgaacctgggaggcggaggttgcagtgagctgagatcccgccgttgcactgcagcctgggcaacaagagcaaaactccgtctcaaaaaaaaaattttttttttaagaagtcacccttaaacccactccttataaaaaaaaatcagtgaaggccgatcatggtggctcatgcctgtaatcccagcactttgggaagccaaggtgagaggatcacttgagatcaggagttcaagactagcctggccaacatggtgaaaccttgtctctcctaaaaatacagaaattagctgggcataggggcacatgcctgtaatcccagctacttgggaggctgaggcaggagaatcacttgaacccctggggcggaggttgcaatgagcagagattgcgccattgcacacaccagcctgggccggtgagacttcatctaaaaaaaaaaaaaaatccatgaatgccaggtgtggtggctcatgcctgtaatcctagtactttgggaggctgaggcaggcggatcccctgagtccaagagtttgagaccagcctggcaacatggtgaaaccccatctctacaaaaaattaaaacagtagctaggcaaggtagtgcacacctgtaatcccagctacttggggagctgagctgggagtatcacctgagcccaggaagtggaggctgcagtgagctatgatcagtaaaacacaagacaggttcactggctcccatcccaacccggaccagctccctagtataacaactcacatgcatgtggactatacccttagagccttcttcttctttcttcttttttcttcttcttctttcttcttttttcttcttcttcttcttcgtgtgtcgctctcacccaggctggagttcagtgcgatcccagctcactgcaacctccgtctcctgggttcaagtgattctcctgcctcatcctctggagtagctgggatgacaggtgcctgccaccacgcccagctatttttttgtatttttagtagagacagggtttcaccatgttggccaggctggtctcgaaatcctgaccttaggtgatctgctgcctgccttggcctcccaaagtgctaggattacaggtgtgagccaacatgcccagccttttttgttttttgagaaagggtctcactctgtcagacaggctggaatgcagtggcatgttcaggactcactatagcctcaacctcccaagctcaagtgatcctcctgcctcagcccctaaagtagctgggactacaggcatgtgccaacacacccagctagttgttatttgctgttgttgttgttttaattttagtagagacaaggtctcactgtgtttcccaggctggcctcgaactcctgagctcaagtgatcttcccgcctcagcctcccaaagtgctggggttacaggtgtgagccaccacatctggccttacagccttcttctgtgtgtttatgtgcatatatgtagccatagggaaaaaaatcaaaatcctttggtgttctttcttattttttcaaatatttcacctgccccattctctttcctttctccttctagtactcccattgcatgcaagttagacctttttttttctttttttttcttttttttgagacggagtctcgcctgagctggagcacagtggtgcgatctcagatctcggctcactccagcctctgcctcccaggttcacatgattctcctgcctcagcctcccgagtagctgggattacaggcatgtgccaccacgcctggccaatttttgtatttttattagagagagggtttcatcatgttggccaggctggtttcaaactcctggacccaagtgatccgcccaattcagcctcctaaagtgctgggattacaggcgggagccactgtgcccagccataagttagatcttttgatatcatccagaaaataccaaggctctatacagtttctaaattgaggtaaaatatatgtaatataaaattaaccattttaaacatgtttaagtgtgcaacttagtagtattcagtacattcaaagtgttgtgcaaccattaccactatccatttttacttaaacttttttcttctctgttcttcagtttggatatttgctatcaatctgtctttaaatttgttagcactttcttttatcatctccaatgcgctatcaagcccaaacagtgaatttttaaatttcagattgtgtatatttttaagttttataatttccatttgttttttgttttgtttgtttgtttgtttttgagacagggtctcactctgttgcccaggctggaatgcagtggtgcaatcacagctcactgcagcctcaacctcttgggctcaagtgatcctcttgcctcagccccccaagtagctgggactacaggcttatgccaccacgctcagctaatttttgtattttttgtagagacggtgtttcaccatgttgcccagctgctcttgaacccctgaactctagtgatccacccaccttggcgtctcaaagtgctgggattacagacataatagctgcctcaaacacctttctgctaattccaacatctgggtcacctcagagccagtctcctttaacttccttctttcctgagcatgggccatgttttccaattttgtgagatgtcaagaaattttggattgagtgctggatattgtggaagatatgttgtagagtctctggattctgttatgttcctttgaagagcaatgattttttaaaatttaactatttttttatcaggcagttaacctggctggactcagactccaaagtctgtttctcctgtggtgggtagcagatgaaatcttggcctagttctgttagcctcagcaaggctagttggaatacgttcaatatccatgggctaagagtcagcaagagatgtacacagacttttaatgtagaatatggggctttccatctctggctcttttcttttctttttcttttttgagatggagtcttgctctgtcgcccaggctggagtgcagtggtgtgatctcggttcactgcaagctccacctcctgggttcacaccattctcctgcctcagcctcccgagtagctgggattacagatgcccgccaccatgcccggctaattttctttttgtatttttagtaaagacagggtttcatcgtgttagccaggatggtctcgatttcctgacctcgtgatccgcctgccttggcctcccaaagttctgggattacaagcatgaggcactgtgcccagcattttttttttttttttttttttagagacagtctcccaggctggagtgcagtggtgcaatcatagcttctgggctcaaaggatcctcccacctcagcctcctgagtagctgggactacaggcatgtaccacctcacccagctttttcttttttttttttggtagagacagggtctcactatcttgccaaagctggtctcaaactcctagcctcaagtaatcctcccacctcagcctcccgaagcagtggaattataggcatgagttacgacacccggccctatcctcttaatctttaagccagtttttatctccaatgaatagcaataaaaatgagaaattcacccagtgccatttctttcttccatttatagattcccttccgattgctacttgtttttcctctttagagtgatactgtccagtagaattttatttcttttttcttttcttttttttaagacagaatcttgctctgtcacccaggctggaatacagtggtgcaatctcggctcgctgcaacctctgccttccaggtttaagcgattctcctgcctcagcctccctagtagctgggattacaggcacgtgccaccacacccggcaatttttttgtatttttagtagagacggggtttctccatgttggtcaggctgatctcgaactcccgacctcagatgatctgcccacctcggcctcccaaagtgctgggattataggcatgagccactgtgcccggcctagaattttctacaatgatggaaatgttccatatctgaattctgcaaagtggtagccactggctacatgtggctattgagtatacaaatgttgttagtgcaacatatttattaaaacctttttatttaaacctttttttttttttttgagacacggtctcaccctgttgcccaggttagagtgctggtggtgtgatcacagctccctgcagcctagatctcccaggcttgtcatccttccacctcagcctcctagagagtagctaggactacagggagacaccaccatgcctcgctgattttttttttttttttttttttttttgaagtggaggtgaggtttcactatgttgtccaggctggtcttaaactcctaggcttgagtgatcctcccgccttgacttcccaaagtgctggggttacagacataagccactgcagccagcctgaatctttttattttattttttttaagagatgagggtctctctatgttgtccagcctggtctcaaattcctggcctcaagcaatcctccaacttcagcctgggattacaggcaaaagccaccacactcggctaatttttttttggggggcggagtcttgctctgtcacccaggctggagtgcagtgctgtgatcttagctcactgcaacttccgcctcccaggttcaagcgattctcctgcctcagcctcccgagtagctgggatcacaggcacgtaccaccacacccagctaattttttgtatttttagtagagacggggtttcaccatgttggccaggctggtctcaaactcctgacctcaggtgatccgcctgcctcggcctcccagagtgctgggattacaggtgtgagccaccgtgcctggcccaggtagttgtttttttatatttagctcagtgtttatcattgttatctatgaaagagctggcctgatgtggctgacttcaccattaccagaaggagaattcttgtggttttccattgtataaattatcaggccattagtgtctctctgtactttgcttttattttttttaactccataatcctcccaagccattgaacatagctcttcctccaccccatacctcctttagtaatttttaaaattaaaaaattttttaattgtggggccgggcgcggtggctcacgtctgtaatcccagcactttgggaggccatagcaggtggatcgcttgattccaagagtttgagaccaacccgggtgacatggcgaaatcctgtctctacaaacaaacaaaaacacaaaaattagctgggcatggtggcacacgcctgtagtcccagctgctcaggaggctgaagtgggaggaccacttgagcctgggtggtgaaggttgcagttagatagcaccactgcactccagcctgagcaacagagacctcgtctcaaaataagagagtcggctgggcgtggtggctcacgcctgtaatcccagcactttgggaggccgaggcgggcggatcacgaggtcaggagatcgagaccatcctggctaacacggtgaaaccccgtctctactaaaaatacaaaaaattagccgggcatggtggcaggtgcctgtagtcccagctactcgggaggctgaggcaggagaatggcgtgaacccaggaggcagagcttgcagtgaactgagattgcgccactgcactccagcctgggcgacagagtgagactccatctcaaaaaaataaataagacagtctccctctgtctccaaggttggagtacagtagtgcagtcatagctcactgcagcctccaacgcctgggctcatgcagtcctcccgagtagctgcaccacaggcatgagccacagcccccagcttccagaacctttttgttttccaaaactgaaatgctgtactttacccattcaattttaactccccatttcccttcccctggcacccaccattctattttttttttttttttttttttttttttggagacagagtcttgctctatcccccaggcaggagtgcagtggcttgatctaaactcactgcaacttctgcttcccgggttcaagcaattctcctgccttagcctctcaagtagctaggattacaggcacgcatcactatgcccagctaatttttgcatttttagtagaggtggggtttcaccttgttagccaggctggtctcgaactcctgacctcaggtgatccacctgcctcggcttctcatagtgctgggattacaggcatgagccaccacgcccggccccattctactttctgtcactatgaatgggactattctagagacctcatataagtggaatcatacaggatttgtcctcttgtgacaggtttatttcattcagcataacgtcctcaagatttatccatattgtatctttctctttttctttctttctttcttttttttttttttcagacagagtttcactcttgttgcccagactggagtgcaatggcaggatctcggctcactgcaacctctgcctcctgggttcaagcaattctcctgactcagcctcccgagtagctgggattacaggcacacaccaccatgcctggctaatttttgtatttttagtagaaacggggtttcaccatgttggccaagatggtcttgatctcctgacctcgtgatctgcccccctcagcctcccaaagtgctgggattacaggcgtgaacgaccgcacctggcataatagggacgaggtttcactatgttggtcaggctagtctcaaactcctgacctcaggtgatccacctgcctcggccttccaatgtgctgggattacagggccatctttttgcttttttttccccatttgctgttttaaaacttctagttcaggccgggcatggtggctaatgcctataatcccagcactttgggaggccgagggaggtggatctcctgaggtcaggagttcgagaccagcctggccatcatagggaaaccctgtcaaaaaataaataaaaaatacaacttctagttcaggctgggtgtggtggctcatgcctataatcccagcactttgggatgccgaggtgggaggattgcttgaacctaggagtttgagactagcccaggcaacatagtgagaccctccccccaatctctataaagaattttaaaattaggcaggctggtggcatgtgtctgtggttccagctactcaggaggctgaggtgggaggatcacctgagccccaggtgggttgaggctgcaatgagctgtgatcgtgccactgtagtccagcctgggtaacaagagcaagaccctatcccaaaacaaaaacaaaacaggccgggcgcggtggctcacgcctgtaatcccagcactttgggaagccgaggcgggcagatcacgaggtcaggagatcaagaccatcctggctaacacggtgaaaccccgtctctaccaaaaatacaaaaaaattagctgggcatggtggcgggcacctgtagtcccagctactccgggggctgaggcaggagaatggggtaaaccgggaggcggagcttgcagtgagccgagatcgcgccactgcactccggcctgggtgacagagtgagactctgtctcaaaacaaacaaaaaaatgccttctagttgaaaaggttttacatgtcctatttcatgacttgtcatttggtgtaccagagttttgttagttcaaatcgagaaagacgtttcctaacatgacatatgcgttagtaaggttttctttggagggggaactctgtatatgctaggtgtttcttaaactttcccaagagtttgggtcaaatttctgcttatggctgggcgtggtggttcatgcctgcaatcccagcactttgggaggccaaggcaagaggaacgcttgagcccagcctgggcaacatggtgaaatcccatctctacaaaaaagtacaaaaattagctgggtgtggtggcacccgcctgtagtcctagctacttgggatgctgaggtgggaggatcacttaggcccaagacgcagaggtagcaatgagccgtgatctcgccacggcactctagcctgagcaacagaaccaggccctgtcttctaaaaaaaaaaaaaaaaaaaaagaaagaaagaaaaaacagggctgggcgtggtggctcatgcctgtaatcccagcactttgggaggctaaggcagatggatcacttgaggccaggagtttgagaccagcctggccaacatggcgaaaccccatctctactaaaaatacaaaaattagccaggcatcgtggcatggacctataattccagctactcagtgtggctgaggcagtagaatcgcttgaaccagagaggtagaggttgcagtgaactgagatcaggccactgcactccagcctgggcaacagagcgagactctgtctcaaaaaaaaaaaaaaaaaaaaaaaaacgaaaaggagaaaagaaagaaatctgtttatttcttagcttgcaagtcaccttgctgttagttctctcacagttatctgccccaggaacacagagacgattatagataaagatcctgttaccttggacctggtaaaggctgctggactaggtgtagctcactcagcctccagctttctgttcattatcttgattgagggggtgatttcatgggtgtgtacatatgtcaaaatgtgttggaactgctgggtgccgtggctcatgcctgtactctcagcactttgggaggcggaggcgggcagaccacctgaggtcaggatttcaagaccagcctggccaacattgtgaaaccccatttccactaaaaacacaaaaaaagttagccacgcatggtggtggatgcctgtgatcccagctacttgggaggctgcggcaagaggatcacttgaacccaggaagtagaggttgcagtgagccaagatcattccactgcactccagcctgggcatagagactgcatctcaaaaaaacagaaaaaagtaggccaggcatggtggcttatgcctgtaatcccagcactttgggaggctgaggtgggtggatcacaaggtcaggagattgagaccatcctggctaacatggtgaaaccccaactctactaaaaatacaaaaaaattagccgggcgtggtggtgggcgcctgtagtcccagctactcaggaggctgaggcaggagaatggcgtgaacccgggaggtggagcttgcagtgagccgagattgcgccactgcacaccagcctgggcgacagagcgagactccgtgtcaaaacaaaacaaaaaaaagtgttggatctcacactttaaacacgtacagcttcttgcctgttgattatacctccgtaatgctgtttttatttttatttttttaccattaatagcccaagtgggccccctcacactcccacgtgtatacttaatcctgtctctgtgcgagtaacaatcagatggtaatccccccccacaatccctgctccactactccacctctggggctggggactgctcattttttccctccaaccccccagagaccagatcctctctcctccctcacggacctccccactttactctgggatgctgggggcccctggagatctcaccctggcctgaccatcactaactggggagagacttagaggcagacttgaatactccaacctccagggagccagggctggctcagaagaaaggtctaggggcagggaggggtattggctggggaggggactctgcctagcataggaagagcaggggaggcctcttaaatagggattttaatctgatccaggacttgaaaggcaagtgggaactggcccagggaagagggcggaggcatgttggaaaaagggcactgatgcagaggcctggaggcttggggctggtcttgggaatcataccatctggatggcatggggctgaggtaaccagagcttgaatagaactgcagaagagacagatgattccagaagggtaaggaggtggaggcccctctttacttccttcccacagcaggcaccaggccagagttgggtgggcacctgctgggggatcctcatggtccagtattggttgtaggttttgagggggctgacaggagaggtggttgccagggaatggttccaagaagatgcaataggggaggaggctggggatacccaggggacatggcccagcttacggaggctcctgagcttccaggggcatagacattaagaaattgcacgctgagcccgagtgtggtggcttgtgtcggtaatcctagcactttgggaagccatagtgggagaatggctcaagaccaggagtgcaagaccagcctgggcaacataccaagaccctatctctacaaaaaaataacaaaaattagctgggtgtggtggcatgctcctgtagtcccagctgcttggaaggctgaggcgggaggatcacttaagtccaagagttcaaggctgtagtgagctgcaatggtgccactgcactccagtctgggcaacagaatgagaccccatctctttaagaaagaaaaattgtggccaggtgtggtggctcacacctgtaatcccagcactttgggaggctgaggcaggtggatcacctgaggtcaagagttcgaaaccagcctggccagcatggtgaaactccgtctctactaaaataaaaattacccgggcatgatggcaaacacctgtcatcctagttattcaggtgggtgaggcaaaagaattgcttgaacccgggaggcagaggttgcagtgagccgagatcgcgccactgtactccagcctgggcaacaagagcaaaactccgtctcaaaaaaaaaaaagaaaaagaaaaaagaaaaattgcatgattagcttctagtaccccgaaagcttagagggcaagtagaaggaggagcttgctttttggggaaactttaatcagcagaggtaggcctggggaggcctccgcaggaccgtatgaaccctgagcccactgtgggagcagagcagccccctcctcacccaaggaagcttctatccttgactgtcccccttgctgactgagtgacctgtgatctgtctctagtcatttcttgctttgagccttgggcttcccagttcccacgtttcctttatgggaatgtttatggagatcaagccaaccatgcctgttaagggtgggttatttttctagagagtttgaccacctgagctaacatccttgcaccctcccacctgtccatctgtctattctactcattcatccatgtagcaaacatttatgtggcatctaatgtgtccagccctgtctgaggctctgaggatacagcagtgactcaaacaacattcttttctttcatgaaacttatgccttggggtgaagaagacaccccaatgaaacagatcaactgggacaagagggttgaaggaactacacaggatcaggagacagaataatatggtggcctctttggtggtagtctgagaagtcttcttggaggaggtgacatttgagctgaaataagaatgataacacagtcagacatgtatgtgactgtctggggtgcaaacatggtacaagtgagcttggtgagttggaagcccagcaagcagcagttgctatggattaagctggggaggcagaggtggggaggcagcagggccagaatgtagagggcaggaatgtgtgcagaaataaggggctcaggtaaggcggaaccttgaacttggggtccaccttggggtctttggggggagtggtacctcaaccggcagcatctctggtcactaacaccctgtgggacctctgctcagagaggctcagagtggaagagacaggtccgtctggaagggacagccaggacccggtgcagaggcaggctgtggttatctgcaaacagcccccttccttccagcatgtcacgtgctcccgcctgagcctctggccgcaggaatcaggtgaccccaggcagcgggccaggctgcaggggcgggtgagtgagtcaatgtatgcaagtgtgtgtgtgtgtgtgtgtgtgtgtgtgttttcatctctgggaggcccagacatctggggtctgaattaattgcctttttcacaaccatggacaagtcctgtatttccagctagattgaaagcaaaacaaaacaaacctatgtgcatagctctgatctgctgagcagtgccagggtccttgggggttcggggaagccgtgggaaccagtccttctcactcagacccctgaagaggggcagggatcctctactcatgccccctaacccacctcccgtgtcagtacaaagccccattctctctctttcccccaatctggggctatttttagccactaagaaggattatcagtttggttcccaggtggcaggggccaagctgggagtggggccagggaggcttcaaacagcagccaggcttgggggcgggtggggtgaggggagaagaggctggtcacactggccctgccacccacgcggtggctctgcagatgaccctgaagctgctgtcgtccagcccagcccaaacacttcagctgcagctttaagggaaggtggcaggggcaaggaaagcttccagcagccttaggcacctcagatgctggaaaccgtcctaagggcttggaagaaccatctagaagcctccataggccagcaccccttctttccagaccactccccatcctgcccccacctcctgtctagcagtaactatcacagtctaagctgttttttggggggtttttttccgaaacaggatctgctccgtcacccaggctggagtgcagtggtgtgatcacagctcactgcagcctcaaactcctgggctcaaccagtcctctcacctcagcctcctgagtagccgggattacaggtgtgtgtcactatgcccacctaatttttaaatttttttgtcttgctatgttgccctggctggtctcgaactcctgaccttaagcaatcctcccacttcggcctctcaaagtgctgggtgtgagccactgcactcggtcctctaaattttactaggtgctcactccacctcaggtgccattccgaaccactccatgtggaagaggggctattgtttgttccattttacagataaaactgaggcacagataggccacgttccatgcctggtaaacgggtgaggcaggaatcaggaatcagatccgttgtgatatcagcatggagtgtttataaactgcccgcctgccctgagcctcacaatagcctggtagaacaaggagggaatctagctgtacccatttttcagatgggacaactgaggcccaggaagacagaggatgacagggaacaaacagaagaactggatccaaaagagaaaagctagaaattgaggaacacatccctcagcctcatttcctcccttccctcaggagaagttgagccttgctggcctgaggtgcctggttatagccatgcctgagcccctcccatatgccagactctgcctcaatgccccaggtgcaaggtctctgagctgcttaaccacccttcagggagggcacctgtcccaccaacaggtgacgaaattgaggctcccagggctttgaagcattgcagctaggactccagccagtctgctgggctccagaccctgttcttttctcaaaccacagcatcttttatttatgctttaagagggagaagagggaagggacgagacagagacaggttggtgaggttagtgagagagtaggacctctggggccagacctctgcaatcagggcatatcagtctgaagcctccttggagagctccctggtttagaaagtgcatctgttcccctttctgtgccactcaggaagcaatgggcatgattcagcagaggagaggagagtttagaactggttatgcttccttctccaaccctccctgcaaaaacactggccagctcctgacatcacagtaagacagggttgcgggagggtgctttaacaggatccaaagcagggcaattgggctgctttcaggaggaggtgacaactgagctgggttttgaaggatgcataggagtttgccaaacagagaaagaaagcgtttaagctcttcagggcagagatgttgcttgttttccccaccattttgtgtcttcagcacccaaatactaaatgagcattctaggcagaggccagtatttgtaaaggctaggatgtgtgaaacgatatggtctggtgggagcagagtatcagtcagtaaactggtgggcattgaagctgggcacatcagcagaggcaaggcttgagattgtgagaagccattgctcctgtggttctccctcatcccctacactcatcatgacttgaatgtaccaaggtgtgcaaggatgcatccaagacccttgggtgaggggaaaacatggagctgggggtctggatgcctgggccttcctaggacacctagtccccttccatctgcaccttggggtctgtcagaaaggtagcagggtctctgagaaagctgcaccagtgactcagaaggctgaggtgggaggatggcttgaacccaggagtttgaggctgcagtgagctatgatcaggccagtgcactccagtctgggtgacaaagtgagaccctgtctctaaaaaaaaaaaaaaaaaaaaaaaaaaaaataggggattgcagataccctgcagtggtcatggctttggctgtgagagctgagtacagttgggaccaagagtgccaagctggccatgtgtccttgagcccccacgggcacacgggatcaagccaaccttgtctgctagtgaagatgatttctttttcttgagaaatcaaccacctgggctgaagtccccacatccacccagctgttcatgtgtctactctgtctgggatgcctgggcctcgttgtaggtctagactagctgctatcccacacccttgactgcttgttgggtcactgacttctagtgcccctccccaaccagagtatccaatgctagcaacagcttctaatacttcactgatgcctaaatgtcagttgccccatagcatggtacttagcctgccccttcatgtgcagtctcttccttttttttttttttcccccaaaacagggtcttgttgaccccttgctgatagatagaggattccatccatcttcatggatttcaacagcagccactcactgacaagtcctacccaggccccacccaccccaagcctgtgccccaaacctgagtagctcctgcctcctccacacgcccacgggaacattttagctgccctcccccacacccacaatttgtgttgtctgacacttagcctgactcctgtcctgaaatcagctcatccattctggttcatccagttcttcagactggaaggctgacagcttcagtggccaagtggggtgaggctgaagatggaattaaggttgttaatcagctgagcttgagatgggagatcatctgggtgaacccagtgtcatcacaagggtcttaaaatgaagaagacggaggcaggagagacactgtcagaatgacaaggtgggagaaagacccaactagccactgctggctctgaagatggaggaagggaccaggagctggagggtgcaggcagcctctaaagccagaaaaggcaggaaatggctgggtgtggtggctggagcctgtagtcccagctactcgggaggctgaggcaggaagatggcttgagcccaggagatcgaggctgcagtgagctatgattgcaccgctgcattccagcctggaagacagagtgagagattgcctccctgcagaaaatgtagtctcttagcaattttccagtatatactatattattaactaaaatcatcatgatgtacagatctcttggacttactactgctgctaactgaaatgtcatatcctttgaccaatatcttgccaatttcctctcccaacccttctcttttctggctccactttggaaagcatttggctcttggggggccccacctctaaaatgtctctggaatccccttatctctaccttatctcaactggacatgccagagcaccctcttctggcctccaaaatgctacgccctgcatggcaaccaacacctgagaatccctgcattattcaaaatagaaccaagggcaacggaaccctcacattctcctgctgggagtgtaagatggtgcagtcctgccttggaaagcagtttgcccaccttggcctcccaaagtgctgggattacaggggtgagccaccacccccggctgccccctaggctggtcttgaactcttggctttggccaggcgcggtggctctcacctgtaatcccagcactttcggaggccaagacaggtggatcacgaggtcaggagatctagaccatcctggctaacatggtgaaaccctgtctctactaaaaatacaaaaaattagccgggcgtagtggcgggcacctgtagtcccagctactcgggaggctgagcttgcagtgagctgagatcgtgccactgcactccaggctgggcgaccgagcgagactccatctcaaaaaaaaaaaaaaaaaaaaaaaacactcttggcttcaagcaattctcctgcctcagtctcccaacgtgctggaattacaggcatgagccactgcacctgggtctattttttattttatttatatatttttattttttattgatttactctgtttttggagacaggtatcactctgtcatttaggctgaagtgtggtggcatgatcacagctcattgcagccccaaactcttgggcttaagcaatcctcctgcctctgcctcacgagtagctaggattatggccacatgccaccttgcccggctaatttttgtattttttgtagagacagtttcgctatgttgtccaggctggtctcaaacccctgggttcaagcaatcctcctgcctcagcctcctaaacactggggttatggtatttttatttttatttattttatttatttttgagatgaagtctcgctctctcacccaggctggagtgcagtggcacaatcttggctcactgcagcctccgcctcccgggttcaagcaattctcctgcctcagcctcctgagtagctgggattacaggtgcccaccaccacccctggctaatttttgtatttttagtagagacggggtttcaccgtgttggccaggctggtctcaaactcctgatcgcaagtgatccactcaccttggcctcccaaagtgctgggattacaggcttgagccaccatgcccggcctatttttattttgtaacatggcaaggttatcatgaagaactgacaaaactaagctttgatgacaaaaaaaaaaaaaaaaaaaaaaaaagctggtggggggcagggcaaggtggctcatgcctataatcccagcaatttgggaggctgagtggggaggattgcttgagcccaggaggtcaagtgtgcagtgaggtatgatggcaccactgcactccagcctgggccacagagtgagaccctgtctaaacaacaacaacaacaaaaaaacaaaaaaactggaatggttgttacttttggatgacaggacaggggtggaggttgactgggaagaggtatgagggaagtttctagaggaaatatttgtgataggagactggattagtcaggtacatagttttgtccaaactcagtgactgtacccttaaagatgtgtgcgggccaggcgcagtggctcatgcctgtaatcccaacacttcgggaggccaaggcgggaggatcgcttgagccaggggtttgagaccagcctggataacatagggagaccctctctctacacaaaaatttaaaacattagccagtcatggtggtgtgtgcctatggtcctggctctgcgggggctgacatgaaaagaccacccgagcccgggaggtcaaggctgcagggagccatgatcgctgcattccagcctgggtgacagagtgagaccctgtctaaaaaaacaaaaagtctgcatttcacttgggtaaattttaccttgaaaggaaaaacccataagcaaatattgaaccctagttaatgatctgtgtgctgacatgtgtaggggcgatgtggcctgaggtcagctgcctactttgaaatgcatcgggaacaagcagatagactgatggtggatagagggatggatgggcagaggcagatgggtgatggaataaacagaatggaatgcaaaggggagaatctagtggtgggaatacaggtattcactgtaaaattctttcaacttttgtgtaggtttgaaatgtttattataaaacattgggggaaggccgggcgcggtggctcatgcctataatcccagcactttgggaggctgaggcgggcagatcacttgaggtcaggagtttgagaccagcctggccaacataacaaaaccccatctctactaaaaatataaaaattagccaggcatggtggcgcatgcctgtaatcccagctactcgggagactgaggcacgagaattgcttgaaccctcaaggtggaggttgcagtgagctgagatcgtgccacggtactccaggctgggcggcagagtgagactccatctcaaaatgttgggggaaataatccagattcttccctgcggcccccatgccttgcaggctctgtgctgcccctcatcacctccctgccctcccctcctccctctctcccccttgctcactgcaccagccacacggacctcctcactgttgctccaacatcccaggcatggtcctgcctcagggcctttgcacctgctgcgtatttatctagaaagcccctcccccagccccaccttcttgtgtgaaaaacccacaaccttctcatctttttttttctcatagggtcttgctctgtccctcaggctggagtatagtggtgtgatcgtagctccctgcagcctcaaactcctgggctcaagtcgtactcccacatcagcttcctgaatagctagaactacagatacgtgccagcacacctgactactttttaaattttttgtagagacagggtcttgctatgttgcccaggctggtcttgaactcctgagctcaagtgatccacctgcctcggcctcccaaagtgttgggattacaggcatgaaccactttgcctggcctgacctccgcatctttttttttttttttttttaagatggagtcttgctctgttgcccagtcttgagtgcagtggcatgatttcaactcactgcaacctctgcctcccaggttcaagtgattctcctgcctcagcctctcaagtagctggggttacaggcacatgccaccacacctggctgatttttgtatttttagtagagatgaggtttcaccatgtgggccaggctggtcttgaactcctgacctcagatgatccacccgcttcagcctcccaaagtgctgggattacaggtgtgagccaccgcacctggcctgacgacctcatctttaagtcccagctcaggtggcgcctccttagagagcctctccttgatcacatttaaaatcacgccactctgttatctacccggcccgttatactttggcatctcattcatttatgaatctgtttacttgtttattggctgccttctctgttggtctgtgagctgggcaggaatgtgttggctttattcccctgctgtgtcgccaaggcccagccctgacctgacatgtacaagtcaattggagaatatctcttgcctggatggatggatggacagacagacggatagatgcaacgacagatggataaatggatggatggaaggggaaatggatagatggaagaaaagatggacagaaggatgggtgggtggaaggacacacaagtgagtgatggatgatgagcggatagatgtttagatgggtggacagatggatgatgaatggatggatgatgggtagatggacagatttttggatcagtggatggatgatggctgggtggacagatgtttagatgggtggacagatggatgatggatggatgggtgaatgggtaggtggatggatgatgggcaggtggacagatgtttggatgagtggatggatgatgggtgggtggacagatggatggatgaatggatggggagatggatgaatgggtgggtagatggatgacagatggacgataggtggatggacaggtgtttggatggatggatggatgatgggtggatggatgaatgggtaggtggatagatgatgtttgtatgggttgatggatgatgggtgggtggacagatctttggatgggtgggtggatggatggtgggtgggcagatgtttggatgggtggacatatggatgatgggtagatggatgagtggataggtggatgatggataatgggtggatggacagatgttttgatgaattaacagatgaatgatgggtggatggacagatgtttggatgggtggatggatggatgatgggtagatgagtggataggtggatgatgaataatgggtggatagacagatgttttgatgggcgaacagatggatgatgggtagatggatgatgagtgggtggacagatgtttggatgggtggatggatgatgggtgggtggacagatgtttggatgggtggatggacgatgggtggatggatgatgggtgggtggacagatgtttggatgggtggatagagggatggatcggtagatagatggacagggggatgcgtggacagacgaatgaacgaacaaactttctgagtgggaaccactgtggtaggctggacccttggctcaagatctcagggaagggagcagctctttgggctcctcaagcaggctgggacacgctggccggagctgccccacctcgaccgccactccattatcaggcaagctcagttatgcagtaggctctcttaccctcttgctttgtgggctctgggatagcaagagacccccctgaaattcccacctagagaggagcctaccttccatagatggccaggaaaggaactctggattttttttttttttttttttttgagacagagtcttgctctgtcacccaggctgcagtgcagtggcctgatctctgctcactgcaacctccgcctcccgggttcaagcaattctctgcctcagcctcccgagtagctgggattacaggcgcacaccaccatgcctggctaatttttgtatttttagtagagacagggtttcaccatgttggccaggctggtcttgaattcctgacctcgtgatccacctgcctcggcctcccaaagtgctgggattacaggcagtgagccactgagcccggcctctggatttctttaaatccttcatctttgggggctgcttcagaggcagcttcctgcagtggaaagaaaccttcctggacgtttgaggactcaagttcttttttttgagacagtttttctctgttgcccaggctggagtgcagtggcatgatctcggctcactgcaacctcctcctcccgggttcaagcgattctcctgcctcagcctcctgagcaggtgggattataggcgcctgccaccacgcccggctaatttttgtatttttagtaaagatggagttttgccatgttggccaggctggtctcaaactcctgacctgaagtgatctgcccacctcagcctcccacagtgttgggattacaggcatgagccatggtgcccggccacgactcaagtttctgaccccaagcagccactcccttgacttctggctaccatcttggcatcagttaagtgcagagtaataactactattttgggctgtgttattattactcttgttaaagatcaatcggccaagcactttaggttgagaagcctgggtattactgtctctgtttttttgttttgttttgttttgtttttgagatggagtcttgttctgtcacccaggctgcagtgcagtggcacgatctcggctcactgcaacctccgcctcccaggttcaagtgattctcctgcctcagactcctgagtagctgggattacaggcatgtgccaccacgcccagctcatttttgtatttttagtagagacagggtttcaccatgttggtcaggctgctcttgaactcctggcctcgtgatccacccaccttggccttctaaagtgctgggattacaggcgtgagcaactgcgcccggcctactactctgttttacagatgaacttgaggttcagagaggtcaagtcatttgcctgaggacacacagcccaactctgccttttaacactgaccaggcaatggagtgggagtgatgagaatgaagtggtggctcttctgggaccagaggacagttccaaagtcccaggcaaggggagttccatcttccagtcctgcctcctggttgtcaactgcgctgataggggcccgagtaggagttctgaggctccagcctctcaggccccacttgccccacccattctgcttgcagacctcccagctaactggaacctgtgtccacagaatgctgtccagtttcaacgagtggttttggcaggacaggttctggttaccacccaatgtcacgtggacagagctagaagaccgggatggccgtgtctacccccacccccaggacttgttggcagccctgcccctggcgctggtcctcctggccatgcgccttgcctttgagaggtgagtgtctgccctgccgcaatccattgcccccgcagtcgctccagtatgtgctcgtgccctgtgtgcaatttgccattgcagcatgtcccgagtagaagctggctttgcaccaaagcgcgttccctggctccagcctgcccccagccgccaccacccacacttctggcctctgatggctggtttataggaacactgactgcagctggtttataggaacactgcactgcctgcagcctgcagctgggtatgccagcatcttcataaaacagggatgggaggccgggcacggtggctcacgcctgtaatcccagcactttgagaggctgaggcgggtggatcacttgaggtcaagagttcgagaccagcctggccaacatggtgaaaccctgtctctgctaaaaatacaaaaattagctgggcgcaaacctgtaatcccaactactcaggaggctgaggcaggagaatcgcctgaacctgggaggtggaggttgcagtgagccaagattgtgccgctgcactccagcctcggcaacagagcaagactccataaaaaaaaaaaaatgtgagctggggtgttatcccatcccaaaggcatcccagggcctctgtgaaggacagtggggtgggcggagggttttccagtttcaaacgcaggggttttagcccttaaaaaaaatttttttttgaatctaggccagacgtggtagctgattcctgtaatgtcagcaatttgggaggctgaggtgggtggatcacttgagtccaggagttcgagaccagactgcgcaacatggtgaaacctcatctctattaaaaaaaaaaaaatacaaaaattaggctgggtgcagtggctcatgcctgtaatcccagcactttgggaggccaaggtgggcggatcatgatgtcaggagttcaagaccagcccgacaaacgtggtgaaaccctgtctctactaaaagtacaaaaaattagttgggtgtggtggcacatgcctgtagtcccagctactcaggaggttgaggcaggagaattgcttgaacccaggagacagaggttgcagtgagctgagatcatgccagtgcactccagcctgggcaacaagagcaaaactccatctaaaaaaaaaaagaacaaaagcctcatccccaccagtagctgggactgtaggcatgccaccatggctggctaacttttttttttttttgagacagagtcttgctctttcaccttggctggagtacagtggcacaatctcagttcactacaacctctgcctcccaggttcaagcgactctcctatctcagcctcacaagtaactgggattacaggcatgtgccaccacacctgactaatttttgtatttttaatagaaacggggttttgccatgttggccagactagtctcaaactcctgacgtcaggtgatccacccaccttggcctcccaaagtgctgggattacaggcaagtgacaccacaacccagctaaattttgtatttttagtagagacaaggtctcaccatgttgcccaggttggtcttgaactcctgagttcaagcaatcctcccgccctccacctccaaaatgagactttaagaggcaggaggcaggaacaaaaaccagaatcctgagttcaaatttcaggtctttcacctgctcacagtgtcaccttgggcatgtctctgagcctcagtttacccattaggacaataggaactgagttagggttagacgagccaatgtatcacatggacttggccccatgcttagcagataataagcgctcattctctccgcatcatgatttattctgcaatgagttccttgctaggctgctctgagcctttcaccaaatgaggcaggatgttaggagggatggtggatataaaattcggtccccacctgtggtgttggcgcgccctcttgtgggcaacgtggccattgaccagggtccctgatctccaagcctctaccccggaatgggggatgctgggaggaggggcttggagcgggaacagccccagcccctgcccatggggagcccctagactggcggggggtcagaccaggacccaggccacagtgagacaggcagtgaagagactcttgtccctggtttgggattgggcaaaggtacctgggtaccccaagagttggtctgcacaccctcaccctacagacaaaggtccagctgccttttttttttttttttttttttggggagacagagtcttgttgctctgtcacccaggcttgagtgcagtggtgcgatctcgactcactgccagctccgcctcctgggttcacaccattctcctgcctcagctcagcctcccaaatagctggggctacaggggcccgccacctcgcccggctaattttttgtattttcagtagatgcaatcctggctcactgcaacctccacctccaggttcaagcaattcacctgcctcaacctcccgagtagctgggattacaggtgcacgccaccacacccagatgattttgtattttcagtagagacagtgtttcaccatattggtcaggctggtctcgaacttctgacctcacgtgatccgcccacctcagccccaaagttctgggataacaggcatgagtcagctgcctttcttatgtttggtctaacgcagcagccaggccacccctccagggccccaggggatgaggccaggaataagtggaaaatcgagtcctgccccacgagcctttctgactctgggcctccaaaccctctgatcagatggaaaagaaagaccaagtcttaggccgggcgcggtggctcaccgctggtaatcccagccctctgggaggccgaggtgggcagatcacgaggtcaggagatcgagaccatcctggctaacacagtgaaaccccgtctctactaaaaaatacaaaaaattagccgggcgtagtggcgggcgcctgcagtcccagctactcgggaggctgaggcaggagaatggcgtgaacccgggaggcggagcttgcagtgagccaagatcgcgccactgcactccagcctgggtgacagtgcaatactctgtctcaaaaaaaaaaaaaaaaaaaagtcttacacaccctgccatgtgccagctgtgctctctgagcctgtaactttgcccctccgagacttggttatcccaccggcagcatgtctgcccccacacacaggcagtcccatctcttcacctgggctgataggctctgtctcctttgcacccagattcattggcctgcccctgagccggtggctgggtgtgagggatcagaccaggaggcaagtgaagcccaacgccacgctggagaaacacttcctcacggaagggcacaggcccaaggaggtgagagccccccatgccctccgacccgcactactgccctgggggtggggcgtggggatggtgtgtggcccatttgttggggcaggagaagccaaggtggctgcaggcacccctgcaatgcccctactttccactcttcatcctcaattccctgggaaagggctctaccccccagcctccctgggaaacgacgccccacccctcccagcatccctgggacatggagccccacccttccagcctccctgggagatgaggaccccccccttcccagcctccttgggagatggggcccctcccctcccagcctccctgagccttagtgggcacagttgcacaatggacagattctaggagagtgagagtagttgcttgctctcctatcctggggaggaatggaaggtctgagctgatagggaatggagtaacagaagcagccctgtgaccctccctccattcccgtctctggtgtggctgcccgctggacagggtctgtgctgtggaggcgtggctgcgtcctgagtggggtggggaatggtgaagaccacataccctagaggcgacagggcagcttccgcagagctagacgtgactccccctttacttgtcaatttccctcttcaggtagggcttggggctggggcaaggtctcaactgcctgtctaggttggaggtgagaactgaccgttctggagggacgcagggaagcctatccgggggtaggggatgctgcacgccagcatctctcttaatcccatccccgtcagcgacctgcctgccctatgaacaggatttgcttctcttagggcccaagtgttctgcagggccccacgctgggacccccaacactgcccctccatatagacatggtcaccctgtaggcaagatgtgggcctgcagtggagagggcagagccaagtcctgtctggggacatgggggaagccaccacagggcctctgtgacccttgtcctcatcaccccctccccagccccagctgtctctcctggccgcccagtgtggcctcacgctgcagcagacccagcgatggttccggagacgccggaaccaggatcgaccccagctgaccaagaagttctgtgaggccaggtaagcccaggatggggcttctggggtgcagggaagcgggccggggtggggcggggcgggtgtctgctattttcacagctccctccccatccacagctggaggtttctcttctacctgtcctccttcgtgggcggcctctcggtcctgtaccacgtgagtataccagagtatagctgactgctcacctgccccatccacctggcctagatctggcaggagtgggggtgtggagtggtgcagccagagaggaaaacatgcagctgaggagagagcgagctttgcaagatggtggtgaatgttcactcaacaggtatttggatttactatgcaccaaaagttggggttctgcagtgaatgagccccccagtcgagagtgagaagcaggaaaaagcagggctgggtgaaggtagcatctatgtgactgtggaaggagaaccaaagagaccgcagacccagggtgggaggttggattctcacctctgcacagcctgacacccatttccctgcaggagtcatggctgtgggcaccagtaatgtgctgggacaggtacccaaaccaggtgagtggcagagtgtgtgtgaatgcttggagggtgagggcgatgatcacagttgctgcagccatgggcatgggacccgaaccctgacactacactgtcattccccactgagtcccacgctctttgattcctctggggaatagagaggggccagaaaaccaagcaggagcttccaccaaaccactgcccttgattacctccagggatggggagctcactcattgggattcaagtatcctggttttgagcaaacggagtgggcccggagccatacccctgcccgattggagccttcgctccccacagctaaccttgtcctgtcctgctgcagactctgaagccatccctgtactggtggtacctcttggagctgggtttctacctctcactgctaatcaggctgccctttgatgtcaagcgcaaggtgaggccaaataagagtctggaagacccagtctctggccgggatgctggggtgctggggggtagggcagccttacaaccgcaccttgagagctccctggtgcctcctgcaggagatatagaggccatgggcccagaggccacaccaaccccctgaaaggacccacttcttggcccatagggtgggggaccttccagcatcaagcctcgtccccactatgacccaccgtctactgcaggatttcaaggagcaggtgatacaccacttcgtggcggtcatcctgatgaccttctcctacagtgccaacctgctgcgcattggctctctggtgctgctgttacacgattcctctgactacctgctggaggtgggcccgacccctgcctgacccttcccagctgctgtacccagccctcccaggtgccccagagatgaggtcccattcctcccaaccttcctgggagatggagccccacccctcctgtctttctcgggtgatgaggccctgccccctctgtcttccaggctgataaggccccaccccctctgtcttcctgggtgatgaagccccacccttcttggcttccttgggcagaggcccccgccttctcagcttccttgggagatgaggccctgccccccatcttcctgggagataaagccctgcccctctcagctccctccttggaggataaagctacacacatgtgcacacacgcatgtattcacatttttttttttgagacggagtctcactctcttgcccaggctagagtgcaatggcacacactgctcactgcaacctctgcctcccaggttcaagtaatctcctgcctcagcttcccaagaagctgggattacaggcacttgccaccatgccagctaacttttgtatttgtagtagagatggagtttcaccatgttggccaggctggtctcgaactcctgacctcaggtgatctgcctgcctcagcctcccaaagtgctgggattacaggcgtgagccaccatgcccagcctatattcacactctttacctttcctgaaaaggtaggtagttcctggaaacaaggccccaccccaactcacctggtcccatcctatagcaccttctctttgagaccagggccctggtcctgagcccatttctccctgctgccctttccaggcctgtaagatggtcaactacatgcagtatcagcaagtgtgcgacgctctcttcctcatcttctcctttgtcttcttctacacccgactggtcctctttcccacccagtgagtcagccctcccatgggggtcagggaggtgggagggcgtgtctgagattccaggactgcctcaccattggtaccctgccccaaggagctggggatcttggctgggagagttccaggaggaggcagggaagggtgtgccaggcacagggcacggcatatgcaaaggcgcagaggtgagacagagaattattattactcagcgtgcctggaccatgcagtgggaggaagggtcagggctgccagcgcaccaaagtctgcccagtaaatatttgtgggggcctcttgagtgtgctggtaacacagcagaggccacagttcaaagatcccggcccttgtgagcagacattgcatgggtgggagcagatggtaagtgaggcagccacgtgaactgcacagcatgcgaaggagagatttactaacaagaaaataaatttgacgggccgggcgtggtagctcatgcctgtaatcccagcactttgggaggctgaggcgggcgggtcacttgaggtcaggagttccagaccagcctggccaacatagtgaaaccccatctctactaaaaatacaaaagttaggctggccacagtggctcacccctgtaatcccaacactttgtgaggctgaggcaggaagatcacgaggtcaggagtttgacaccagcctggccaacatggtgaaaccttgtctctattaaaaattaaaaattagccggacgtgatggtgcatacctgtaatcccagctactcgggaggctgaggcaggaggatcacttaaacccagaaggcagaggctacagcgaatcaagattgtaccactgcactccagcctgggtgacagagggagactttgtcttaaatcaaattggccaggtgtgatggctcacgcctgtcatcccagcactttgggaggccaaggtggctggatcacctgaggtcaggagatcgagaccactttggccaacacagagaaaccctgtctctactgaaaacacaataattagctgggcatggtggcacacgcccgtaatcccagctactcgggaggctaaggcaggagaatcacttgaacccaggaggcagaggttgcagtgagctgagatcacaccactgcactccagcctgggcgacagagcaagactctgtctctaaataaaaaaaagtcaggaagggagcaggaagtatgggagaggtgggtagttggaattagaatggcaggtaatgcctcgctggcagcgtttgtaccgagagatgggagggaggtgagggacagaaccacgttgatcagaggggaagtgtgttccaggcagagaatagcatgtgcaaagggcctgaggcaagaccatgcccggcatgttagaggaagagcaaggaggcctgtgtggctggagcagagtgggtgagggggagggtaggcaggagatggagtaggccgtgcaggtccttgagggctgtgggcaggactttggctttgaccccgggggagatgggagccatggaggttataagcagagggattcaatctgacctaggtgttctgggtgccctttggcagctgcaggggaaacatcatgggaagtgtgggcaggagtgaggggacccagggtaggcgagagaagtgggcagacttaaggggatgcctctgggatcaggaggtgggaacaagcacagaaggaactgctcgaggcagcaggagctcagccctgctgggtttgaggggtctgtggcctcagaggagacatggagaaggcagtgggcatgccagtctgggcttctggggaaagaggtaatgtaggagttgtcagtccatggctggtatttgcagccagcagcctggatggcatcacctagggaccaggtatggacagagagtctcagtcctcgggcttcctgatgtttgcaggtcgagagaggaagaacagggcccatggagcatgagagtcagattacatccctcctctggctgccatcctccatggctcccacctgtcttggtttcaaggcctgaggagattaggcagaagtggctgtgagatggggagatggtggggtgcggggagccagagagggaaggggcccagggaggagggagggctgctggcaacctgttgtgccagctggtggggctgcagggctgagcactgtggagtgaggaaggcgaggtcgctggtcaccctacagctgattggggggtaggagaaacacagcagctacagccagtactttttgagatggagtcttgctctgtcacctagactggagtgcaatggcgtgatctcagcccaccacaacctccgcctcccgggttcaagcaattctcctgcctcagcctcctgagtagctggaattataggcacacaccaccacacctggctaatttttgtatttttttttttttttttagtagagatgggggtttcaccatgttggccaggctggactcgaacttctgacctcgtgatccacccgcctccacctcccaaagtgctgggattacaggcgtgagccactgtgcccagcccagccagtactttcaaggagttccaaggaaaaaaaaaagcctacagggaaaagaaataagttggtgcccagaggggcagagtaaagagtgagctttttgtttttttctttcttgtgtgaaataacagtgggattggagttgatgataaagaaccagcaggaaggctgggtgcggcggctcacgcctgtaatcccagcactttgggaggctgaggtgaacagatcacttgaggtcaggagttccagaccagcctggccaacatggcaaaaaccacctctctactaaaaatacaaaaattagctgggcgtggtggcaggggcctataatcccagctacttgggaggctgaggcaggagaatcgctggaacctgggaagcagaggttgcagtgagccgagatcacgccattgcactccagcctgggtgacagagcaagactccatctcaaaaaaaaaaaaaaaaaaaaaaaaaaacaagaaccacagctgagtttgagaagaggatgtggtgggagctgggctccaggacagtgtcccaggcaacaagcaaggaggagttcgagggaaggagcagtgctggggaacattctttccaactggcttgggttgcacagtgaaaatgaagccccgcccctcccagcctccgtgggagacaaagccccacctctgtccggctacccgggagatgaggccccaccccttttttactccttgggagatgaggccccgcccctcttaaactctgggagatggagccctgctccctgtgtcttcctgggagatgaggccccaccgcctgccttcctgacatgaagcccctcccctatgaggtgagtaggcagtcgcctgctgatgaaggggaggtgatgggggtctgaggagtagagagaagctgccagagtgccacccaggaaagcagctgagttcataagtacccgcttgggtggggttcatagtcatgaatggccagtcagggagctcgtgtgtgtgttctgctcatttagtacaagcgagagggggcctcgcgtgcccagctcaagagtgttaggtatcatggggtggggggcactagggagccataggtggttatggagcagggaaggccatgccagttagaaattcttaggactgggggctacagcggctggtcaaaccccagcctcctcctctccccctggctgtaggatcctctacaccacatactacgagtccatcagcaacaggggccccttcttcggctactacttcttcaacgggcttctgatgttgctgcagctgctgcacgtgttctggtcttgcctcattctgcgcatgctctatagcttcatgaagaagggccaggtatggctggacctccccgggggccccagccctaagctcctccttcctccctgctctgagctccatccctctctctgttccccagatggagaaggacattcgtagtgatgtagaagaatcagactccagtgaggaggcggcggcggcccaggaacctctgcagctaaagaacggggcagctggagggcccaggccagcccccactgatggccctcggagccgggtggccgggcgtctgaccaacaggcacacaacagccacatagccgggcggggctggctgtaaggggttgcccccccgccagtgccttggatatttctggggtgactggactggcgcccctgggccacctttctggagacagggagggccccacccggggtgggtgggaaggctgatgatctgtctccagccccttccttctgcccacccacccttcttccctctgggcaactggacagatctgggagccagcagctggatgctgtggctggccagagacacctccaggctgtggcctgggggctggggggagccccaggctgaaaagggtccaattaaaacaaatggagccaaattttctgcctgagaacttgggtccctatcaaagttccttcttcatccccagagacccccgagggagccaggcctctgcttacataccccacctacgggatactcactgccacccaaggatgcagggccccaggggccccagacagcaacagagctcagagaccacccgctccccacgctgttcccagatgagcccctgactcgccagccagtgactcaaacaagcccctccctccacccttagggtacccttgggtcagcctctcaaagacccccttgcagactagctctgaaaggtcaagtcctttgcccaagctcacaggtaggtcacagaccaggcctgtctctgcagtcctttcttaagtccggtagattgcccacctttgtggtccctggatccttccttgggacagtggagggagtgggctgaaatcccacagacttcccaagggttagcctggggaggtcactgtctcttcaagagctccaaaaataaacagaggccaggcctggtggctcacacctggaatcccagcacttttggaggctgaggcagggggatcacttgaggtcaggaggtcaagaccagacttggcaacatggtaaaaccccatctctactaaaaatacaaaaactagcagggcagggtgacccacacctgtaatcgcagtcacctgggaggctgaggcaggagaatcgcttgaacccgggaggtggaggctgcagtgagccaagatcacgccactgcactccagcctggtcaacagagcaagactccatctcaaaacaaaacaaaagccaggcgtggtggctcgcgcctgtaatcccagcactttgggaggccgaagcgggcggatcgtgaggtcaggagatctagaccatcctggctaacatggtgaaacctcacctctactaaaaatacaaaaaattacccaggcgtggtggtgggcgcctgtagtcccatctactcgggaggctgaggcaggagaatggcgtgaactcagaaggcggagcttgcagtgagccaagatctcgcgccactgcactccagcctggttgacagagcaagactgtctcagataaacaagaaattggacaacaaagtattggagagaatgtggggggtcaataatctcacattatcgggggaatataaattgttaccaacactggaaaaaccattcagcattgtgtataatagttgaccttttataaagctcaaaagcaacccaaatgagataatatataggcatgaatacctagctagtagaactgtaataaaatataaacacaaaattcaaattagtaaattacctttgatctgggaaggtaagggaatgggattcagatagatatcaattactatcactgttctagtttttgaagtgaggtgaagttttttttgttttttgagatggagtctctttctgtcacccaggctagaatgcactggtgccatcttggctcactgcaacctctgcctcccaggttcaagtgattctcctgcctcagcctcccgagtagctgggactataggcacgtgccaccacacccgggtaatttttgtatttttagtagagaggtggttttgtcacgttggtcaagctggtctcgaacgcctgacctcaaatgatccacccgcctcagcctcccaaagtgctggaattacaggcgtgagagaggtgaagtttttgaagtgaagtgacacactcattaaatacaatttttaaagggatatgacaagctacaaaatggaagaaaatatttgcatatgatatatctgaagaggttctagcatccaagatatataactcttacaactcaataacaacaaaaaccctaatttaaaaaatgggtgactgggcacggtagctcatgcctgtaatcctagcactttgggaggccaaggcaggcaggtcacctgaggtcaagagttagagaccagactggccaacatagtgaaaccccatctctactaaaaatgcaaacattagccaggcgtggtagggggtgcctgtaattccagctactcgggaggctgaggcaggagaatcacttgaacctgggaggtgcaggttgcagtaagccgagatcatgccactgcactccagccagggcaacagagccagactccatctcaaaaaaaaaaaaaaaaaagggggggggggcaaagagaccaggtgtggtggctcacccctataatcccagcactttgggggcttaggcaagaggatcagttgagtccaggaattcaagaccagcctgggaaatatagcaagactcccttctccacaaaaaaagaaaaaaataggcaaaggacttgaatagaaatttctcgactgagtgtggtggctcacacctgtaatcccagcactttgggaggctaaggcaggtggatcacctgcggtcaggagttcgaaaccagcctggccaacatggtgaaacccatctctactaaaaatacaaaaattagccgggcatggtgacacgtgcatgtaatcccagctactcgggaggctgaggcaggagaatcgcttgaacccgggaggcagaggttgcagtgagctgagagcgcgccactgcacttcagcctgggcaacaagagcaagactccatctaaaggaaaaagaaaaagaaaaaaaaaattcccaaaaagaaatggccaataagcacatgaaaagatattcaacattgttagtcattaggaaaatgcaaatcaaaaacacaatgagaaaccactttacatccacaagagtgggtataataaaagaagtgttggccaggtgcagtgtaatcccctcatgcctgtaatccccaaactttgggaggctgaggcaggtggatcacctgaggtcgagacttcgagaccagcctgaccaacatggagaaacccctctctcctaaaaatacaaaattagccgggcatggtggtacatgtctgtaatcccaggtacttgggagactgaggcaggagaatcacttgaacctgggaggcagaggttgcagggagccaagatcatgccactacactccagcctgggtaacaagagcgaaactctgtcttaaaaaaaaaaagtgttggcaaggatgtggaaaaaatgaaacaactgtattcactgctggtggaaatgtaaaatgatcactgtggaaaatcgtttggtggttcctcaagaaattaaatagaattactatatgatccagcaattccactcctaggaatagacccaaaagaattggaagcaggtactcaaatatttacacatgaatgttcatagcagcactagtcacaataaaggtagaaacagctgatcacaatggttcactcctgtaatcccaacactttgggaggtcgaagtgggaggattgcttgagcacaggagttcaagaccagcctggacaacatagtgagacatggtctctgcaaaaaaatagaaaaatcagcagggtgtggtggcatgcacgtatactcccagctactcaggaagttgagtgagaggattgcctgagcccaggagtacaagactgctgtgagctatgatcatgccactatactccagcctgcgcaacagagagaccctgtctggaggggtggggggagaaaaaaacaccatagaaacaacccaaatgtccaataacaaattgtagtccatccatacaatggactactactcagccatgaaaaggaatacagcactcacatatgctgcatgtgaatgaaccctggaagcattatgctcagtgtaagaacccagacataaaaggtcacacattttatgattccacctatatgaaatatccagaagaggtaaacctataaaaataaaatgtatatttatagctgccgggggcttcagggtgaaggcataggaagaaactgtttaatgggtacggagttttatcttgcagcggtggaaatgttttggaactaaagtcgtggttctacaacattgcaaatgcactcgatgccactgaactgttcactttaagatggttcgttatgtaaatttcatcttaataaatgcatgaagaaagggatttgtatgtatcaactacagtgtctcatgaagcaaagattataattattccatttacctggtgtttccctatccaataattcccatttcctccaaaaaaacaaataataggaacctcatgggttgaaagagagcccataatgaagattagaaaatacactcctatagatgaatagcaaaggccgggcacagtggctcacgcctgtaatcccagcactttgggaagtcaaggtgggcggatcacgaggtcaggagatcgagaccatcctggccaacatggtgaaaccccgtctctactaaaaatacaaaaattagctgggtgtggtggcacatgcctgtaatcccagctactcgggaggctgagacatgccagcactccagcctggcaacagagtgagattttgtctccaaaaaaaaaaaaaaaaaaaaaaagatgaatagcaaaaatataaaaatattacatgtcaatgtttgtggagtgtagcttaagcaatcctttggaggaagtttgcagcctaacaggcttatattagaaacgaaaaaaaaaaaaaagcagcctggcgtggtggctcacacctgtaatcccagcactctgggaggccaaggggggtggatcatgaggtcaggagtttgagatcagtctgaccaacatggtgaaaccccgtctctactaaagatacaaaaaaaaaaaaaaaaattagccagcagtggtggcacgtgcctgtaatcccagctactcaggaggctgaggcaggagaatcgcttgaacccaggaggcagaagtttcaatgagccaagattgtgccattgtactccagcctgggcaacagggtgagactcaaaaaaaaaaaaaaaaaaaaaaaaaaaagaaaaagctcaaaaataattagctaagcatttaagaagattttaaagaacagtaaaataagctcaataaaagaaaaaacaggataagtgttaaaattaggatcatcaaacctaaaagttagttatttgaatgactaacagacgaacatctggcaagattaataaagaaaaataaaagaagtcacagaaaaaaatatagagacaggccaggtgcggtggctcatacctgtaatcccagcacttctggagaccaagggagaggatcacttgagcccaggagttcaagatcagcctggcaacatggcaagacccccatctctgcacaaaatttaaaaatcaggcatggtggtatgtgcctgtagtcccagctactcaggagctcaaggcaggaggaccacttgaaccaggagttcaaggctgcagtgagccgtgatcttgccactgcactccaacctgaggaatagtggaaggccccaacactaaaaaacaaaaataaagcatcatacatgtcaaatgttatatttaatgtcatatttaattgttgggtacataacccttaaggtaagaaataagacaatagctgctatcgccacccttattcaaaattattctgggagttctagttaacaataaatcaaaaaaggccgggcgcggtggctcacgcctgttaatcccagcactttgggaggccgaggcaggcagatcacctgaggtcgggagttcgagaccagcctgaccaacatggagacaccccatctctactaaaaatacaaaaaaattagccgggtgtggtggcgcatgcctgtaatcccagctacttgggaggctgaggcaggagaatcacttgaacctgggtggcggaggttgcagtgaggcgaggtcacgccattgcattccagcccaggcaacaagagtgaaattccgccaattaaaaaaaaaaaaaccgtaaaacaaaaaaagatatcagtaggagaaataaagagaataaaactgcccattattagtctatgacatatctatatcaaaaacccaggatgtagaaggcagcacaagataacagaatagaaggctccaccaaccatccctccaacaaggacaccaatttaacagctacacacaaaaaagcactttcccaagaaccaaaaatcccagccgggagcagtggctcatgcctgtagttccagctactcaggaggctgaggcaggagaatcacttgaacccgggaggcagaggttgcagtgagccgagatcgcgccactgcactccagcctgggcgacagagcaagactctgtctccgaaaaaaaaaaaaaaaaaaaaaaaaaaaaaaaaaaaaaaaaaaaaaaaaaaaaagaagaaccaaaaatcaggtgagcactcacagtacccggttttaactttatatcactgaaagacacactgaagaaacacactgaaagtcctgaatctctgacaccacctctccgccacccctggcagcatggtgtggagagtgcctttgtgtgttggggagagggagggggcagcaattgtgaggcatggaacccagcgctgtccttttagagcagaaagaaaaacccgaccacactcagctgatgcccacccatagagggtgtgggcggcaagccacccaggtgccgaggcaagagactgagggcacaagttgttccagtaaaataaaaaatatatataaaataaaaatagttacaccagaagacaagagtgcgagccctctgttatgcccggacagggccactagagggctccatggtctagcggtaatgccggcgcctgggaaggcacccgttacttagcagaccgggaaagggagtctccctttccttgggggagttagagaagactctgctccaccacctcttgtggaaggcctgacatcagtcaagcccccaccatccccacctgccaacagccatccagaggcctaacagtctagcctctgtcatgctgtgcttcagcggtcacgctcctgtttcactttcatgttccaccctgtacacctggctctgccttctagaaaacagtagcagaattaagtgaaagtattaagccgttgacctctccaagaaataatgacataagctgtcccctctctctgcctcggctaccaaacagggaagggccccctgtccagtagacacatgactcacgtgaccttacctatcactggagatggctcaacactccttaccctgcccccttgccttatatccaaaaaataacagtgcagccaggcattcagggccactaccggtctctgcgtcttggtggtagtggtcctccaggccccagctgtctttccttctctttgccttgtgtctttatttctacgatctctcatctccacacacgaggagaaaaacccacaggccctgtagggctggtccctatagagggggcatttaaaccagccctaacaagagggaaattatggatcccagtggaatttgagttcctgcaaactttgcgacccaccatgggctaaagtgctctgggtctctaagtaaatttgaaagtcagtctaggctatcagtgcaactcctaggcaagtcctagtgaggtagaagataagatttgacttcagaggtggggctcagacaccagaccatattgaggactagctaaaacaggtgaaggaaaagggagggggaagcagctttcgatgagacatgcctgccagtgtgccgtgtcaatttcacattaccatgctaacatcaaggaattactgcccctttccaggcaatgccccaatgattagtacccccttccctaaaagtttctacataaactgccccttaatctgcatgcgattaaaagtgggtatatgccaggcacagtggctcacgccagtaatctcagcactttgggaggctaaggcaggtggatcgcttcagcccaggagttcaagaccagcctggccaacatgtcaagaccccatctctgctaaaaatacaaaaactggcggggcagggtggctcatgcctgtaattccagcactttgggaggttgaggaggacagatcacaagctcaagagatcgagaccaccctggctaatgcagtgaaaccccgtgtatactaaaaaatacaaaaaattagccaggcctgatggtgggcacctgtagtcccagctactcaggacgctgaggcaggagaatggtgtgaacccaggaggtggagcttgcagtgagccaagatcgtgccactgcactccagcctgagcgacagagtgagactccatctgaaaaaattagccaggcctgctggtgcccgcctgtagtcccacctacttgggaggctgaggcagaaaaatcactggaacccaggaggcggaggttgcagtaagctgtgatcacgccattgcactccagtctgggcaacatgagcgaaactccgtctcaaaactaaaagaaaagatgaagatgaaaagaatacctttatggaaaaatataaaatgcaaaacttgcaccaagaggtaccaaaaaactttactaaatccataaatattaatgaaatggaaataacttgggggagggggcagacaatatggttcatgcctgtgatcccaacattttgggaggctaaggtagacagatcacttgaacccaggtgtttaagacccatctggtcaacatagcgaaacctggtctctacaaaacaatttaaaaattaggccgggcgcggtggctcacacctgtaatcccaccactttgggaggccgaggtgggtggatcacaaggtcaagagatcgagaccatcctggctaacatggtgaaaccctgtctctactaaaaatacaaaaaattagttgggcgtggtggcgggcacctgtagtcccagctactcgggaggctgaggcaggagaatggcctgaacccgggaggcggagcttgcagtgagccgagattgcgctactgcactccagccttggcgacagaggaagactccatctaaaatttaaaaaataaaaataaataaaaattagctggatatggtggtgtgtgcctgtagtccccactactcgagaggctgaggctgaaggatcgcttgaacccaggaggtcaaggctatagtgagtcatgatggtgccactgcactccagcctggttgacagagggagaccctgttgaaagaaaaaaatgagagaaagagaggaagggaaggggaagggaagaaacaaactaccttccgctaaaggacaaaacccagaggatttttcaaccaaagtttttggggtttttttttttttttttttttttagacggagtcttgctttttttttttttgagacagcgtctcgctccgtcgcccaggctggagtgcagcggcgcgatctctgctcactgcaagctccgcctcccaggttcacgccattctcctgcctcagcctcccgagaagctgcgactacaggcgtccgccaccacgcctggctaatttttttctatttttagtagaaatggggtttcaccatgttagccaggatggtctcgatctcctgacctcgtgatctgcccgcctcggcctcccaaagtgctgggattacaggcgtgagccaccgtgcccggccccaatcaagttttatcaacatttcaagtaacagttatttctcatctaattcaggctgataccaagaagagggggagggaaaaaaaagagggaaagggggagaatatccaatttcttttatttttaaattttttattttggagacagggttttgctctgttgcccaggctggaatgcagtggtgtgatcacagatcactgcagcttccaacacttgggctcaagcaatcctcctgcctcagtcttcccagtagctaggatgacaggtgcacacaaccacacccagctaatttttttatttttggtagagattaggccttgctatgttgtccaggatgatctgaatctcctagcctcaaaccatcctcccacctcggcctcccaagcactaggattacatgtgtgagtcaccaaaatgagtacagggcttccttttggggtcatgaaaatattctggcagtagatagatatggttgcactgcactgtgaatgtaccaaatgccactgaatcattcacttcacaatggttaattttatgttatatgaatttcactttgataaaaacagatgtggccgggcacaatggctcatgcctgtaatcccagcacttgagaggccaaggccagtcgatcacctgaggtcaggagttcgagaccagcctaaccaatatggtgaaaccccatctcgaatctctactaaaaatacaaaaattagccaggcatggtagcatgcacctgttgtcccagctacaggaggctgagacagaagaattgcttgaacctgggaggtggaggttgcagtgagccaagatcacaccactgcactccagcactccaggttggatgaccgagcacaactccatctcaaaaaaaaaaaaaaaaaaaaaaaaaaaaaaagaggaggccaggcactgtggctaaattctatcatcccagccctttgggaggccaaggcaggtggatgacttgaggctaggagcttgagaccagcctgggcaacataatgagaccccatctcacaaacaaaaaagatttcttggccaggaatggtggctgacgcctgtaaccccagcacttttgagagtctgaggcaggtggatcacaaggtcaggagttcaagaccagcctagcaaacatagtgaaaaccccatctctactaaagatacaaaaaattagctgggcgtggtggcacgtgcctgtaatgccagctactcgggaggctaaggcaggagaatcactctaactcaggaggcagaagttgcagtgagctgagatcacagcaccactgcactccagcctaggcaacagagcgagactctgtctcaaaaacaaaaaacaagaacaaaaacaaacaacagttctagagatgggtggtggtgatgagtgcacaacattgtaaaaatactgaatacctttgaagcccactttaaaattgttaaagtggtcaattttatgttatttttaggtataatacttacgtactttttgtatttttttctattatgtattgatatgtatatttaacagtagaaaaaaaatgatggtcactcgatcggaaacagaaaaggttaaagcaaaagtaaaatgcatgaaaaccagggagaactgccagataagcacatggtcagtgaccctggattagcccgaggctgactgggtgttggacatggggaacgaccaccacctaggggcaacttgccatctgccgctatgttctttctgggacttggaaaaacatgcattactaggaacttcccctactgttattccctgtttcccccgccaccccgcccgagacagagtcttactctgtctcctaagccggagtgcaatggccgatctcggctcactgcaacacccgcttcccgggtccaagcgatcctcctgtctcagcctcctgagaagctgggattataggcacaggccaccatgcctggctaatgtttgtatttttagtaaagacgggatttcgccacgttggtcaggctggtctcgagctcctgacctcaagtgatccgacagccttggcctcccaaagtgctgggattacagacgtcagccaccgcacccggcctgttatttcctcttaatactgacatcatcctcctgtttaccaatctttgtcacagaccaggtggcatctctgagaaaacagaaatcagcaggagagaccttccagagccactgccctccatcaacctgcagacctgcatcaggacccagacgcagtggctcttcctcttgccctgtgagaatcaatttgccctggatgcagcaaaaccacgcccccttctccaccaactcctccaccccttcatgggcctagacaagcacctacctcaacaacctccccgcacccctggagcattcctatcagcacacaaataggttgatgcatttttccctcctttgtttttattattaaggtgaaactcacacggcataaaattaacctttgttttttttcctttttttttttttgagactgagtctcgctgtattgcccaggctggagtgcagtggcgcgatctcggctcactgcaacctctgcctcccaggttcaagcgattctcctgcctcagcctctcaagtagctgggaccacaggctcgtgccacgacacctggccaattattgtatttttagtagagacagggttttgctatgttggccaggctggtctcaaactcctgacctcaagtgatccacctgcttcagcttcccaaagtgctgggattacaggtatgagccaccatgcccagccccttctttttttgagagagagagagagagacacagacagacagagtctttgtcacccaggctggagtgtagtgactcgatctcagctcaccacaacctccaccgcccgcctcagcctcctgagtagctgggactacaggcacacgccaccataccctgctaatttttgtattttttgtacagaaagggtcttgctatgttgcctaggctggtcttgaactcctggcctcaagggatcctcctgccttgacctctcaaattcattttcttctgagggcttctattccatgcaaaacttctattaagtaaatctgtatcctctcctgttaacctgtttttgtttgttttgttttctgagacagtcttgctctgtcacccgggctagaacacagtggcacaatctcagctcactgcgacctccgcctccagggttcaagcaattctcctgcctcagcctcccgagtagctgggataacaggcaccagccagcacgcccagctaattttttgtatttttagtagagatggggtttcaccatgttggccaggctggtctcaaactcctgacctcgtgatttgtcgacctcgtgatttgcctgcctcggcctcccaaagtgctgggattacaggcgtgagccactgtgccatgcctggccctatttttttttttttttttttttttttttttttttttttttttggtagggggagatggagtttcctcttgttgcccaggctggagtacagtggtacaatcttggctcaccacaacctccgcttcctgggttcaagcaatttcctgcctcagcctcccaagtagctgagattacaggtgcccaccacgacacctggctaatttttgtatttttagtagagacagggtttcaccatgttggtcaggctggtctcgaactcccgacctcaggtgatccagctgccttggcctccaaaagtgctggaattacaggcgtgagccaccacgccctgcctgttaacccattttatgtcaacttaataattctcaggcctagagggatcctaagagaacagaggtgaatttttgctgccggacctgctgctatgaactttaatctatgagtttttttttttttctcgagttagtatcttgctctgctgcccaggttggagtgcagtggcaagatcagggctcactgcagcctcaaccttctggcctcaagcattccacctagttcagcctcctgagtagctgggactacaggcaggcaccaccacacccaaataatttttgtatttcttgtagagatgaggtctcactatgttcccaggctggtctcaaattttcgggctgaagtcatccacccaccttggcgtctcaaagtgctgggattacaggcgtgaaccatcacgcccaaccctttttcctttttaagatacagcagggtctcactctgttgccctggctggagcacagtggtacaataatagctcactccagccttgaccaccgggactcaagcaatcctcccatctcagcctcccaactagctaggattaaacatgtgagccaccatgccccgcttccatctctttttcattttgtcttgtttttttttttgtacagaatattgctctgttgcccaggttggagtgcagtggcatgatctctgctcactgcaaccttctcccaggttcaagcgattctcctgcctcagccacccgtgtagctgggattacaggcacccgccaccacacccggctaaatttttcatttttacaagagaccgggtttcaccatgttggccagggtggtcttgaactcctgacctcaagggatctgcccgcttcaacctcccaaagtgttgggattacaggcgtgagccaccgcacccaacttttcatctgttttctgattcttccttagctccaaaacatctaaggtttggctgcattcactcctctccagcccacagacgcccaactgggccaattcccaaattcatcattctagcccaaaccctagggtccagtgccttctcagcctctgccacaaggggtcctcgcaggccgctccagtgttgcaggtcccaatctggactcctaggggtttcccacccaagccttgtccgagcgtcctctccctctcagttagcaccatcttcccaggctctgctctgacagttctgaggcatccacgcctcctcccacctgcatccaatgtgtctgccaatcctacagcccccatcgccttttccttcaaaacagacctagaagccagttatcactgaccacctgcacttgccagctaggtccagccccttcctgacttctggggatcagtgcagttgtcccctccctggtctccctgcaggttctgttctccccactgcaaccagaaacaccttctctttttttttttttttttttgagacagagttttgctcttgttgcccaggctggagtgcaatggtgcaatcttggctcactgcaacctccgcctcccgggttcaagcgattctcctgcctcagcctccctagtaactgggattacaggtgtctgccaccacgcccggctaattttttgtatttttagtaaagacggggtttcactatgttggtcaggctggtctcgaactcctgacctcaggtgacccacccacctcagcctcccaaagtgctggaattacaggcgtgaaccaccacgcccagctctttcgttttcttttgagacagagtctcgctctgtcgccctggctggagtacaatggcatgacctcggctcactgcagcctcttgcctcccaggttcaagcgattctcctgcctcagcctcctgagtagctggaattacaggcatgcaccaccatgcctggctagttttgtacttttagtagaccgggttcgaccatgttggccaggctggtctcgacctctcaaagtgctgggattacaggagtgaatctccgcaccagctttttttttttttttttttttttttgagacaggaacttgctgtcacccaggctggagtgcattggcggatttcggctcactgcagcctctgcctcccaggttcaagcaattcttctgcctcagcctcctgagtagctaggattacaggcatgcactacaccacatccagctaatttttttttttttttttttaaagacagtttccctcttgttacccaggctggagtacaatgacaagatctcggctcactgcaacctctgcctcctgggttcaagcagttctctagcatcagtctcccaagtagctgggattacaggcgcctgccaccacacccagctaatttttgtatttttaggagagacagggtttcaccatgttggccaggatggtctagaactcctgacctcaggtgatctgcccacctcagcctcccaaagtgctgggactacaggcatgaaccagtgcacccagctactaatttattttagtagagatggggttttgccatgttgtccaggctggtctcgaactccagtcctcaggcgatccacctgccttgatctcccaaagtcctgagattacaaatgtgagccaccgggctcagccctattttttcagggctattttgttcatggttagaaccaggaacagcactgatacatagtagcattcaacagatatattttattgttgttttctagagacaggatcttgctccattgcccaggctggagtgcaatgggtgatcatagctcactgtagcctccatctcccaggctcaagcaatcctcccacctcagcctcctaagtagctgcaactacagaaacttcaggtatgtgccaccatgcccagctattttttttgttttttagtataaatgagatctcactatattgcccaggctgatctccaacacctgggttcaaacagtcctcatgcctcagcctcccagagtgcttggataacaagtgtgagccgctgcacctgaccatcaacaagtatcttttttaaccagcttttaccagtcggggtctggccatgttgaccaatctgtatgaaacatttttttgttttgttttaaattagctgggcacagtggcgcagacctgtagtcccagctaatcaggaggctgaggcgggaagatctcttgagcctgggaggttgaggctacagtgagctataattctataactgcaccaccgtactccagcttgggagccaaagcaagaccctgtctctaaggaagaaaaaaatgaaaaaaagagtttctgagctatcatactagcttcagtttgctagggtggccataacaaaataccacagcttgggtaggttaaaaacagaaacttacatttctggaggctgacgtccaagattaagatgtcatcagggttggtttctgcttttcatttttgaaacggagtcttgctctgctacctaggctggagtgcagtggcaccatcttggttgcactgcaacctccacctcccagattcaagcaattctcgtgcctcagcttccagagtagccccaggttcaagcaattctcgtccctcagcttctcgagtagctgggattacaggcgcccaccaccacgcccggctaatttttctatttttagtagagatggggttttgccgtatttccgggatggtctctaaatcctgacctcaaatgatcacgcctgggattacatgcgtgagccaccgcacccggcccagagctggtttctactgagcccccttgctttgtcttacagagccgcggccgcctcctgcgtgccctcacatgctctcttctctgcatgcacccttcgtatttcttagtgtccatatttcttcttcttgtagggacaccaggcagattggatgaggacccgatgtagcagtgtatccagaattggtggggtcttggtctcactgacttcaagaatgaagccacagaccctcgtggtgaatgttacagttcttaaaggcagcgtgtccacagtttgttccttctgatgttcggatgtgttcgtagtttcctccttctggtgggttcgtggtctttccggctcaggagtgtagctacagaccttttgcagtgagtgttacagctcataaaggcagtgtggacccaaacagcgagcagcagtaagacttattgcaaagagaaaaagaacaaagcaaccacagcatgaaagacaacccaagttgccactgctagctggggcaacctgcttttattcccttatctggccccacccacatcctgctgattggtccattttacagagagctgacaggtctgttttacagagagctgattggcccattttgacagggtgctgattggtgtgtttacaatccccgagctagacacaaaagttctccaagtccccacagagcactgattggtgcatttacaaaccttgagctagacacagggtgctgactggtgtatttacaaaccttgagctagacacagagtgctgattggtgtatttacaatcccttagccagacataaaggttctccaagtccccaccagattagctagatacagagtgctgattggtgcaattacaaaccctgagctagacacagggtgctgattgatgcatttacaatccctcagctagacataaaggctctccaagtccccactagactcaggagcccagctggcttcaggcagtggaacccgcagggggtcagaggtagagctgcccaccagtcccttgccacacgcctggactcctcagccctcttggcttgggcagtcgatgggaccaggcgtcgtggagcagtgggtggcgctcatgagggaggctcgggcggagcaggagcccagggcagggggaagcctcaggcatggggggctgcaggtcctgagccctgcccagccgggaggcagctgaagccccgcgagaattcgagtgcagcgctggcgggccggcactgctgggggacccggcacaccctccacagctgctggcccgggtgctaagcccctcaactgcctggggccggtggcaccggctgtccgctctgagtgcgggggcccacgcccacccggaactcgcgctgtcccacgagccccttgcgcacagcccgggttcccgcccgcgcctctccctccacacctttagcaagcagaaggagctggctccagcctcggccagcccagagagggactcccacagtgcggtggtgggctgaagagctcctcaagcgcggccagagtggacgcggaggcccaggaggcaccgagagcaagcgagggctgccagcacgctgtcacctctcagcagcttcttttttttttgagacagggccttgctttgtctcccaggctggagtgtagtggcgctaacagctcagtgcagcctcctggaatcaagcaatcttcccacctcagcctcctgagtagctgggaccacgggtgcacaccaccaagtcctgctaattaaaaaaattttttttcttttcttctttttgagacggagtttccctcttgttgcccaggctggagtgcaatggtacaatctcggctcactgcaacctccgcctctcagattcaagcaagtctcctgcctcagcctcccaagtagctgggattacaggcatgtgtcaccatgcccacctaattttgtatttttagtagagacgggtttcactatgttggtcaagctggtcttgaactcccgacctcaggtgatccacctgcctcagcctcccaaagtgctgggattacaggcgtgagccaccacacttaggctttttttttttttttttttgaaacagactctcactcttttgcccaggctggagtgcagtggtgggatctttggctcactacaacctctgcctcctgttctcaagtatttctcgtgcctcagcctcctgagtagctgggattcaagtgtgcaccaccacaccgagctaattttttgtatttttagtagaggcaggctctccctatgttgcccaggctggtttcaaactgctggccttgtgcaatccacccacctcagcctcctgaagttctgggatgacaagtgtgagccaccacacctggccttaatcacccctttaaagaccctgtatccggcctggcatggtggctcacgcctgtaatcccagcactttgggaggccaaggtgggtggatcacctgaggtcaagagttcgagactagcctggccaacatagtgaaactctgtctctactaaaaatacaaaaattagctgggcgtggtggtgagcgcctgtaatcccagctacttgggaggctgaggcaggaaaatgacttgaacccgggaggcggaggttgcagtgagccgagatcgcgccactgtactccagcctggtggcagagcaagactctgtctcaaaaaaaaaaaaaaagaaattaaccgctgctcacagctgtgctagcttacaggaacaaaggccaagtgccaataaccacaaatgagccacaagatgagagctgacctcagcagtgctccataggcctgattcctcactccactggcataataaaatctccacagccagggtgcactggctcccagctgtcatccaagcactttgggagggtgagaaaggcggctggtctcaaactcctgacttcaagtgatcacccacacctcagcctcccaaagtgctgagattacaggcgtaagccaccacacccggactataacatccattcttttagggagccccagaacctgtgaaattaatctctgctctggccgggcatggtggctcacacctgtaatcccagcactttgggaggctgaggcgggtggatcacgaggtcaggacatcgagaccagcctggccaacatggtgaaacctggtgtctactaaagatacaaaaaagtagccaggcatggtggtgtgtgcctgtaatcctagctatttaggaggctgaggcaggagaaatgcttgaacctgggaggcagaggttgcagtgagccgagatcacaccattgcactccagcctgggcaacagggcgacactctgtctcaaaaaaaaagaaattaacccctgctcacagctgtgctagtttacaggcatgaaggccggatgccattaaccacaactgagccacaagatgagagctgacctcagcagtgctccatctgcctgaatcctcactccatgggcagagtaaaatctccacagccagggcacaatggctccaagctgtcatcccagcattttgggagtgtgaggagggaggattgcttaagtcagagagttcaagaccaccctgggcaacatggtaagaccctctcttggcctgtaatcccagcacttcaggaggccaaggtgggcagatcacgaggtcaggagtttgagaccaccctggccaacatggtgaaaccctgtctctactaaaaatacaaaaaaaaaaaaaattagccgggtgtggtggcacgcgcctgttactactcaggaggctgaggcaggagaattgcttgaacccgagagtcagaagttgcagtgagctgagattgtgccactgcactccagcctgagcgacacagcgagactcagtctcagaaaaaaaaaaaaaagaccctctctctacaaaaaataatgtaaaaattagccgggcgtggtgatgcatgcctgtagtcccacctacttgggaagctgaggcaggaggattgcttgagctcagaaggtcgaggctgcagtgagctacgatcgcaccactgtacttcagcctgagcaacagagtgaggtgctgtttcaaaaaaaaaaaaaaaaaaaagctgggattatatgggtcacacctataatcccagctactcaggaggctaaggcaggagaattgcttgaacctgggaggcggaggtggcagtgagctgagatcgccccactgcactccagcctgggtgactgatcgagactctgtctcaaaaaaagaaaaaccaaaaaaaaaaagtcttcagtggggagaggtgcactttgctaagcacatataatgccaggtacaaaagaaaagaaaggctgaacacttcagtgccccctagaaagccccacctctttccaggaatccccacccccagtctgcatctacatgccctaggaaactttaaaactcccctcatcacacctgcagggagtaggcactttgagcaggagttcctccctttctccattcattgattgacgaataaagtttctatcttgctttactgaacctggtcttgttctgttggtgcaaatggcaacccgcagagaaaggactcattagtctcaaacaatccccttaagagtgggtaacagcggacaccatggctcacacctgtgatcccagtgctttgggaggctagggtgggaggatcacttgagctgaggagttaagagaccagcctgggcaacgtagaaagacctcatctctaaaaaaaaaaaaaaaaaaaaaaaaaaggcagaggggaggggggcgggcgtggtgtctcacgcctgtaacccctgcactttgggaggccaaggcaggcaaatcacctgaggtcgggagtttgagaccagcctgaccaacatggagaagccccgtctctactaaaaatacaaaaaattagccaggcatgatggcacatgcctataatcccagctactcgggaggctgaggcaggagaatcacttgaacccaggaggcaaagtttgccgagatggagccattgcactccagcctgggcaacaagagggaaactccaccaaaaaaaaaaaaaaaaaaaaaaaaaaaaaaaaaaaaaaggcgagggggaggagggagactttaaaaaaagaaaaataaaaaaagttttttttggccaggcactgtggctcacgcctgtaatcccagtactttggaaggccgaggtgagcggattgcctgaggtcaggagttcgagaccagtctggccaacatggtgaaaccccgtgtctactacaaatagaaaacaaattcgcctgatgtgttagtgcaggcctgtagtcccaggtactcaggaggctgagacgggagaatcgcttgaacccgggaggcagaggttgcagtgagccgagattgcaccactgcactccagccaggtagacagagcaaggctccgtctcaaaaataaataaataaataaataaataaataaataatgtttttgagatagtctcaaaagggtgttcaggcccttatgtgttccccccactcacacacacacacacacacacacacacacacacacacacacacaggatctgggctgacctggactccactgaatccacagaatacagcatcggcaacattgacccagcagtctctctgctttgtgtgttggggaaccccaagtcaccgtggcaggagtgtggccaccttgctcaggagtccacgtggagaggccacatggagaggtcagctatcccagacatgacagaccttctggatgggacatccagccagcccggcccccagatgatggcagccactgtcacatggaacaaatgaacccccagtgagcctggtcagcccagagccaggagagaggatgcgacaacaggtgtttggagccagtgggcatggggcggtttgctccactgagaacaagaatgcatgacagtcaggacggtccagagcctagaggtccacttaggtggcatgtggcacccacaccagcctcacagccgggcacacatatccctgacataccctgttgtccgtcgaggctgactcgtgacagagaaaacgttagagaaaaaacctggctggatgcagtggctcacacctgtaatcccaacgctgtggggggccgaggtgggagaattccttgagatcaggtgttggaggccagcctgggcaacatagaccaaccctgactttacaaaaataaaaaattagctgggtgtgatacatgtgactgtaatcccaaaactcgggagactgaggcaggaggatttttcttttttttgagatggagtcttgctcttgtcacccaggctggagtgcaatggcaggatcttggctctctgcaacctctgcctcccaggttcaagcaattctcttgcctcagcctcccaagtagctgggattacaggcgcctgccaccacacccggctaatatttctatttttagtagagatgtggtttcaccatgttggccaggctggtctcgaactcctcacctcaggtgatccgcccaccttggcctcccaaagtgctgggattacaggcatgagccaccgtgcccagcccaggcagatctcttgatcccagttcaaggctgcagtgagctgtgatcacactactgcactccaacctgggcaacaggtccatctgagtccatctctaacggtcccagggaggtcactcccctgcaaggaggctactgtggcccccaacatcccattcagagatttagaagctgaggataagggaggaactttgccctgtcacccagaagtcagggtgtgaattaactttaccggtcaccaacctttttggcagcagggactggtttcatggaagacaatttttccacggaccaggggtggggatggtttcaggatgattcaagtacattacttgtttttgtttgttttttgagacagtcttgctgtgacacgcaggctggaatgcagtggcctgatcacggctcactgcagcctggacctcccaggctcaagcaatcctcctacttcagcctcccaagtagctgagactacaagtgcacaccaccacccacagctagttaaaaaaaaatgtataggccaggcacagtggttcacgcctgtaatcccagcactttaggaggccgaggcgggcggatcacctgaggtcgggagttcaagaccagcctgaccaacatggagaaaccccttatctactaaaaatacaaaattagccaggtggggtggcacatgcctgtaatcccagcaacaagaacgaaactctgtctcaaaaaaaaaaaaaaaaaaaaaatttgcagagatccctatgatgcccaggataaataataaaaccttttttttcttttttgagacagagtctcactctgtcacccaggctgcagtacaatggcgtgatctcagctcactgcaatttccacctcccaggttcaagcgattctcctgtctcagcctcccgagtagctgggattacagacgcctgccaccacacccaaccaattttttgtatttttggtagagacagggtttcaccatattggccaggctgggggggagggaaaaaaaagagggaaagggggagaatatccaatttcttttatttttaaattttttattttagagacagggttttgctctgttgcccaggctggaatgcagtggtgtgatcacagatcactgcagcttccaacacttgggctcaagcaatcctcctgcctcaggcttcccagtagctaggatgacaggtgcacacaaccacacccagctaatttttttatttttggtagagattaggccttgctatgttgtccaggatgatctgaatctcctagcctcaaaccatcctcccacctcggcctcccaagcactaggattacatgtgtgagtcaccaaaatgagtacagggcttccttttggggtcatgaaaatattctggcagtagatagatatggttgcactgcactgtgaatgtaccaaatgccactgaatcattcacttcacaatggttaattttatgttatatgaatttcactttgataaaaacagatgtggccgggcacaatggctcatgcctgtaatcccagcacttgagaggccaaggccagtcgatcacctgaggtcaggagttccagaccagcctaaccaatatggtgaaaccccatctcgaatctctactaaaaatacaaaaattagccaggcatggtagcatgcacctgttgtcccagctacaggaggctgagacagaagaattgcttgaacctgggaggtggaggttgcagtgagccaagatcacaccactgcactccagcactccaggttggatgaccgagcacgactccatctcaaaaaaaaaaaaaaaaaaaaaaaaaaaaaaaaaaaaaaagaggaagccaggcactgtggctaaattctatcatcccagccctttgggaggccaaggcaggtggatgacttgaggctaggagcttgagaccagcctgggcaacataatgagaccccatctcacaaacaaaaaagatttcttggccaggaatggtggctgacgcctgtaaccccagcactttgagagtctgaggcaggtggatcacaaggtcaggagttcaagaccagcctagcaaacatagtgaaaaccccatctctactaaagatacaaaaaattagctgggcgtggtggcacgtgcctgtaatgccagctactcgggaggctaaggcaggagaatcactctaacccaggaggcagaagttgcagtgagctgagatcacagcaccactgcactccagcctaggcaacagagcgagactctgtctcaaaaacaaaaaacaagaacaaaaacaaacaacagttctagagatgggtggtggtgatgagtgcacaacattgtaaaaatactgaatacctttgaagcccaccttaaaattgttaaagtggtcaattttatgttatttttaggtataatacttacgtactttttgtatttttttctattatgtattgatatgtatatttaacagtagaaaaaaaatgatggtcactcgatcggaaacagaaaaggttaaagcaaaagtaaaatgcatgaaaaccagggagaactgccagataagcacatggtcagtgaccctggattagcccgaggctgactgggtgttggacatggggaacgaccaccacctaggggcaacttgccatctgccgctatgttctttctgggacttggaaaaacatgcattactaggaacttcccctactgttattccctgtttcccccgccaccccgcccgagacagagtcttactctgtctcctaagccggagtgcaatgggcgatctcggctcactgcaacacccgcttcccgggtccaagcgatcctcctgtctcagcctcctgagaagctgggattataggcacaggccaccatgcctggctaatgtttgtatttttagtaaagacgggatttcgccacgttggtcaggctggtctcgagctcctgacctcaagtgatccgacagccttggcctcccaaagtgctgggattacagacgtcagccaccgcacccggcctgttatttcctcttaatactgacatcatcctcctgtttaccaatctttgtcacagaccaggtggcatctctgagaaaacagaaatcagcaggagagaccttccagagccactgccctccatcaacctgcagacctgcatcaggacccagacgcagtggctcttcctcttgccctgtgagaatcaatttgccctggatgcagcaaaaccacgcccccttctccaccaactcctccaccccttcatgggcctagacaagcacctacctcaacaacctccccgcacccctggagcattcctatcagcacacaaataggttgatgcatttttccctcctttgtttttattattaaggtgaaactcacacggcataaaattaacctttgttttttttcctttttttttttttgagactgagtctcgctgtattgcccaggctggagtgcagtggcgcgatctcggctcactgcaacctctgcctcccaggttcaagcgattctcctgcctcagcctctcaagtagctgggaccacaggctcgtgccacgacacctggccaattattgtatttttagtagagacagggttttgctatgttggccaggctggtctcaaactcctgacctcaagtgatccatctgcttcagcttcccaaagtgctgggattacaggtatgagccaccatgcccagacccttctttttttgagagagagagagagacacagacagacagagtctttgtcacccaggctggagtgtagtgactagatctcagcttaccacaacctccaccgcccgcctcagcctcctgagtagctgggactacaggcacacgccaccataccctgctaatttttgtattttttgtacagaaagggtctttctatgttgcctaggctggtcttgaactcctggcctcaagggatcctcctgccttgacctctcaaattcattttcttctgagggcttctattccatgcaaaacttctattaagtaaatctgtatcctctcctgttaacctgtttttgtttgttttgttttctgagacagtcttgctctgtcacccgggctagaacacagtggcacaatctcagctcactgcgacctccgcctccagggttcaagcaattctcctgcctcagcctcccgagtagctgggataacaggcaccagccagcacgcccagctaattttttgtatttttagtagagatggggtttcaccatgttggccaggctggtctcaaactcctgacctcgtgatttgtcgacctcgtgatttgcccgcctcggcctcccaaagtgctgggattacaggcgtgagccactgtgccatgcctggccctatttttttttttttggtagggggagatggagtttcctcttgttgcccaggctggagtacagtggtacaatcttggctcaccacaacctccgcttcctgggttcaagcaatttcctgcctcagcctcccaagtagctgagattacaggtgcccaccatgacacctggctaatttttgtatttttagtagagacagggtttcaccatgttggtcaggctggtctcgaactcccgacctcaggtgatccagctgccttggcctccaaaagtgctggaattacaggcgtgagccaccacgccctgcctgttaacccattttatgtcaacttaataattctcaggcctagagggatcctaagagaacagaggtgaatttttgctgccggacctgctgctatgaactttaatctatgagtttttttttttttctcgagttagtatcttgctctgctgcccaggttggagtgcagtggcaagatcagggctcactgcagcctcaaccttctggcctcaagcattccacctagttcagcctcctgagtagctgggactacaggcaggcaccaccacacccaaataatttttgtatttcttgtagagatgaggtctcactatgttcccaggctggtctcaaattttcgggctgaagtcatccacccaccttggcgtctcaaagtgctgggattacaggcgtgaaccatcacgcccaaccctttttcctttttaagatacagcagggtctcactctgttgccctggctggagcacagtggtacaataatagctcactccagccttgacctccgggactcaagcaatcctcccatctcagcctcccaactagctaggattaaacatgtgagccaccatgccccgcttccatctctttttcattttgttttgttttttgtacagaatattgctctgttgcccaggttggagtgcagtggcatgatctctgctcactgcaaccttctcccaggttcaagcgattctcctgcctcagccacccgtgtagctgggattacaggcacccgccaccacacccggctaaatttttcatttttacaagagaccgggtttcaccatgttggccagggtggtcttgaactcctgacctcaagggatctgcccgcttcaacctcccaaagtgttgggattacaggcgtgagccaccgcacccaacttttcatctgttttctgattcttccttagctccaaaacatctaaggtttggctgcattcactcctctccagcccacagacgcccaactgggccaattcccaaattcatcattctagcccaaaccctagggtccagtgccttctcagcctctgccacaaggggtcctcgcaggccgctccagtgttgcaggtcccaatctggactcctaggggtttcccacccaagccttgtccgagcgtcctctccctctcagttagcaccatcttcccaggctctgctctgacagttctgaggcatccacgcctcctcccacctgcatccaatgtgtctgccaatcctacagcccccatcgccttttccttcaaaacagacctagaagccagttatcactgaccacctgcacttgccagctaggtccagccccttcctgacttctggggatcagtgcagttgtcccctccctggtctccctgcaggttctgttctccccactgcaaccagaaacaccttctctttttttttttttttttttttttgagacagagttttgctcttgttgcccaggctggagtgcaatggtgcaatcttggctcactgcaacctccgcctcccgggttcaagcgattctcctgcctcagcctccctagtaactgggattacaggtgtctgccaccacgcccggctaattttttgtatttttagtaaagacggggtttcactatgttggtcaggctggtctcgaactcctgacctcaggtgacccacccacctcagcctcccaaagtgctggaattacaggcgtgaaccaccacgcccagctctttcgttttcttttgagacagagtctcgctctgtcgccctggctggagtacaatggcatgacctcggctcactgcagcctcttgcctcccaggttcaagcgattctcctgcctcagcctcctgagtagctggaattacaggcatgcaccaccatgcctggctagttttgtacttttagtagaccgggttcgaccatgttggccaggctggtctcgacctctcaaagtgctgggattacaggagtgaatctccgcaccagcttttttttttttttttttttttttttgagacaggaacttgctgtcacccaggctggagtgcattggcggatttcggctcactgcagcctctgcctcccaggttcaagcaattcttctgcctcagcctcctgagtagctaggattacaggcatgcactacaccacatccagctaattttttttttttttttttttaaagacagtttccctcttgttacccaggctggagtacaatgacaagatctcggctcactgcaacctctgcctcctgggttcaagcagttctctagcatcagtctcccaagtagctgggattacaggcgcctgccaccacacccagctaatttttgtatttttaggagagacagggtttcaccatgttggccaggatggtctagaactcctgacctcaggtgatctgcccacctcagcctcccaaagtgctgggactacaggcatgaaccagtgcacccagctgctaatttattttagtagagatggggttttgccatgttgtccaggctggtctcgaactccagtcctcaggcgatccacctgccttgatctcccaaagtcctgagattacaaatgtgagccaccgggctcagccctattttttcagggctattttgttcatggttagaaccaggaacagcactgatacatagtagcattcaacagatatattttattgttgttttctagagacaggatcttgctccattgcccaggctggagtgcaatgggtgatcatagctcactgtagcctccatctcccaggctcaagcaatcctcccacctcagcctcctaagtagctgcaactacagaaacttcaggtatgtgccaccatgcccagctattttttttgtttgttttttagtataaatgagatctcactatattgcccaggctgatctccaacacctgggttcaaacagtcctcatgcctcagcctcccagagtgcttggataacaagtgtgagccgctgcacctgaccatcaacaagtatcttttttaaccagcttttaccagtcggggtctggccatgttgaccaatctgtatgaaacatttttttgttttgttttaaattagctgggcacagtggcgcagacctgtagtcccagctaatcaggaggctgaggcgggaagatctcttaagcctgggaggttgaggctacagtgagctataattctataactgcaccaccgtactccagcttgggagccaaagcaagaccctgtctctaaggaagaaaaaaatgaaaaaaagagtttctgagctatcatactagcttcagtttgctagggtggccataacaaaataccacagcttgggtaggttaaaaacagaaacttacatttctggaggctgacgtccaagattaagatgtcatcagggttggtttctgcttttcatttttgaaacggagtcttgctctgctacctaggctggagtgcagtggcaccatcttggttgcactgcaacctccacctcccagattcaagcaattctcgtgcctcagcttccagagtagccccaggttcaagcaattctcgtccctcagcttctcgagtagctgggattacaggcgcccaccaccacgcccggctaatttttctatttttagtagagatggggttttgccgtatttccgggatggtctctaaatcctgacctcaaatgatcacgcctgggattacatgcgtgagccaccgcacccggcccagagctggtttctactgagcccccttgctttgtcttacagagccgcggccgcctcctgtgtgccctcacatgctctcttctctgcatgcacccttcgtatttcttagtgtccatatttcttcttcttgtagggacaccaggcagattggatgaggacccgatgtagcagtgtatccagaattggtggggtcttggtctcactgacttcaagaatgaagccacagaccctcgcggtgaatgttacagttcttaaaggcagcgtgtccacagtttgttccttctgatgttcggatgtgttcgtagtttcctccttctggtgggttcgtggtctttccggctcaggagtgtagctacagaccttttgcagtgagtgttacagctcataaaggcagtgtggacccaaacagcgagcagcagtaagacttattgcaaagagaaaaagaacaaagcaaccacagcatgaaagacaacccaagttgccactgctagctggggcaacctgcttttattcccttatctggccccacccacatcctgctgattggtccattttacagagagctgaccggtctgttttacagagagctgattggcccattttgacagggtgctgattggtgtgtttacaatccccgagctagacacaaaagttctccaagtccccacagagcactgattggtgcatttacaaaccttgagctagacacagggtgctgactggtgtatttacaaaccttgagctagacacagagtgctgattggtgtatttacaatcccttagccagacataaaggttctccaagtccccaccagattagctagatacagagtgctgattggtgcaattacaaaccctgagctagacacagggtgctgattgatgcatttacaatccctcagctagacataaaggctctccaagtccccactagactcaggagcccagctggcttcaggcagtggaacccgcagggggtcagaggtagagctgcccaccagtcccttgccacacgcctggactcctcagccctcttggcttgggcagtcgatgggaccaggcgtcgtggagcagtgggtggcgctcatgagggaggctcgggcggagcaggagcccagggcagggggaagcctcaggcatggggggctgcaggtcctgagccctgcccagccgggaggcagctgaagccccgcgagaattcgagtgcagcgctggcgggccggcactgctgggggacccggcacaccctccacagctgctggcccgggtgctaagcccctcaactgcctggggccggtggcaccggctgtccgctctgagtgcgggggcccacgcccacccggaactcgcgctgtcccacgagccccttgcgcacagcccgggttcccgcccgcgcctctccctccacacctttagcaagcagaaggagctggctccagcctcggccagcccagagagggactcccacagtgcggtggtgggctgaagagctcctcaagcgcggccagagtggacgcggaggcccaggaggcaccgagagcaagcgagggctgccagcacgctgtcacctctcagcagctgctttttttttttttttttttttttttttgagacagggccttgctttgtctcccaggctggagtgtagtggcgctaacagctcagtgcagcctcctggaatcaagcaatcttcccacctcagcctcctgagtagctgggaccacgggtgcacaccaccaagtcctgctaattaaaaaaattttttttcttttcttctttttgagacggagtttccctcttgttgcccaggctggagtgcaatggtacaatctcggctcactgcaacctccgcctctcagattcaagcaagtctcctgcctcagcctcccaagtagctgggattacaggcatgtgtcaccatgcccacctaattttgtatttttagtagagacgggtttcactatgttggtcaagctggtcttgaactcccgacctcaggtgatccacctgcctcagcctcccaaagtgctgggattacaggcgtgagccaccacacttaggctttttttttttttttttgaaacagactctcactcttttgcccaggctggagtgcagtggtgggatctttggctcactacaacctctgcctcctgttctcaagtatttctcgtgcctcagcctcctgagtagctgggattcaagtgtgcaccaccacaccgagctaattttttgtatttttagtagaggcaggctctccctatgttgcccaggctggtttcaaactgctggccttgtgcaatccacccacctcagcctcctgaagttctgggatgacaagtgtgagccaccacacctggccttaatcacccctttaaagaccctgtatccggcctggcatggtggctcacgcctgtaatcccagcactttgggaggccaaggtgggtggatcacctgaggtcaagagttcgagactagcctggccaacatagtgaaactctgtctctactaaaaatacaaaaattagctgggcgtggtggtgagcgcctgtaatcccagctacttgggaggctgaggcaggaaaatgacttgaacccgggaggcggaggttgcagtgagccgagatcgcgccactgtactccagcctggtggcagagcaagactctgtctcaaaaaaaaaaaaaaagaaattaaccgctgctcacagctgtgctagcttacaggaacaaaggccaagtgccaataaccacaaatgagccacaagatgagagctgacctcagcagtgctccataggcctgattcctcactccactggcataataaaatctccacagccagggtgcactggctcccagctgtcatccaagcactttgggagggtgagaaaggcggctggtctcaaactcctgacttcaagtgatcccccacacctcagcctcccaaagtgctgagattacaggcgtaagccaccacacccggactataacatccattcttttagggagccccagaacctgtgaaattaatctctgctctggccgggcatggtggctcacacctgtaatcccagcactttgggaggctgaggcgggtggatcacgaggtcaggacatcgagaccagcctggccaacatggtgaaacctggtgtctactaaagatacaaaaaagtagccaggcatggtggtgtgtgcctgtaatcctagctatttaggaggctgaggcaggagaaatgcttgaacctgggaggcagaggttgcagtgagccgagatcacaccattgcactccagcctgggcaacagggcgagactctgtctcaaaaaaaaagaaattaacccctgctcacagctgtgctagtttacaggcatgaaggccggatgccattaaccacaactgagccacaagatgagagctgacctcagcagtgctccatctgcctgaatcctcactccatgggcagagtaaaatctccacagccagggcacaatggctccaagctgtcatcccagcattttgggagtgtgaggagggaggattgcttaagtcagagagttcaagaccaccctgggcaacatggtaagaccctctcttggcctgtaatcccagcacttcaggaggccaaggtgggcagatcacgaggtcaggagtttgagaccaccctggccaacatggtgaaaccctgtctctactaaaaatacaaaaaaaaaaaaaattagccgggtgtggtggcacgcgcctgtactactcaggaggctgaggcaggagaattgcttgaacccgagagtcagaagttgcagtgagctgagattgtgccactgcactccagcctgagcgacacagcgagactcagtctcagaaaaaaaaaaaaaaagaccctctctctacaaaaaataatgtaaaaattagccgggcgtggtgatgcatgcctgtagtcccacctacttgggaagctgaggcaggaggattgcttgagctcagaaggtcgaggctgcagtgagctacgatcgcaccactgtacttcagcctgagcaacagagtgaggtgctgtttcaaaaaaaaaaaaaaaaagctgggtgcggtgggtcacacctataatcccagctactcaggaggctaaggcaggagaattgcttgaacctgggaggcggaggtggcagtgagctgagatcgccccactgcactccagcctgggtgactgatcgagactctgtctcaaaaacagaaaaaccaaaaaaaaaaagtcttcagtggggagaggtgcactttgctaagcacatataatgccaggtacaaaagaaaagaaaggctgaacacttcagtgccccctagaaagccccacctctttccaggaatccccacccccagtctgcatctacatgccctaggaaactttaaaactcccctcatcacacctgcagggagtaggcactttgagcaggagttcctccctttctccattcattgattgacgaataaagtttctatcttgctttactgaacctggtcttgttctgttggtgcaaatggcaacccgcagagaaaggactcattagtctcaaacaatccccttaagagtgggtaacagcggacaccatggctcacacctgtgatcccagtgctttgggaggctagggtgggaggatcacttgagctgaggagttaagagaccagcctgggcaacgtagaaagacctcatctctaaaaaaaaaaaaaaaaaaaaaaaaaggcagaggggaggggggcgggcgtggtgtttcacgcctgtaacccctgcactttgggaggccaaggcaggcaaatcacctgaggtcgggagtttgagaccagcctgaccaacatggagaagccccatctctactaaaaatacaaaaaattagccaggcatgatggcacatgcctataatcccagctactcgggaggctgaggcaggagaatcacttgaacccaggaggcaaagtttgccgagatggagccattgcactccagcctgggcaacaagagggaaactccaccaaaaaaaaaaaaaaaaaaaaaaaaaaaaaaaaaaaaaggcgagggggaggagggagactttaaaaaaagaaaaataaaaaaagttttttttggccaggcactgtggctcacgcctgtaatcccagtactttggaaggccgaggtgagcggattgcctgaggtcaggagttcgagaccagtctggccaacatggtgaaaccccgtgtctactacaaatagaaaacaaattcgcctgatgtgttagtgcaggcctgtagtcccaggtactcaggaggctgagacgggagaatcgcttgaacccgggaggcagaggttgcagtgagccgagattgcaccactgcactccagccaggtagacagagcaaggctccgtctcaaaaataaataaataaataaataaataaataaataatgtttttgagatagtctcaaaagggtgttcaggcccttatgtgttccccccactcacacacacacacacacacacacacacacacacacacacacacacaggatctgggctgacctggactccactgaatccacagaatacagcatcggcaacattgacccagcagtctctctgctttgtgtgttggggaaccccaagtcaccgtggcaggagtgtggccaccttgctcaggagtccacgtggagaggccacatggagaggtcagctatcccagacatgacagaccttctggatgggacatccagccagcctggcccccagatgatggcagccactgtcacatggaacaaatgaacccccagtgagcctggtcagcccagagccaggagagaggatgcgacaacaggtgtttggagccagtgggcatggggcggtttgctccactgagaacaagaatgcatgacagtcaggacggtccagagcctagaggtccacttaggtggcatgtggcacccacaccagcctcacagccgggcacacatatccctgacataccctgttgtccgccgaggctgactcgtgacagagaaaacgttagagaaaaaacctggctggatgcagtggctcacacctgtaatcccaacgctgtggggggccgaggtgggagaattccttgagatcaggtgttggaggccagcctgggcaacatagaccaaccctgactttacaaaaataaaaaattagctgggtgtgatacatgtgactgtaatcccaaaactcgggagactgaggcaggaggatttttcttttttttgagatggagtcttgctcttgtcacccaggctggagtgcaatggcaggatcttggctctctgcaacctctgcctcccaggttcaagcaattctcttgcctcagcctcccaagtagctgggattacaggcgcctgccaccacacccggctaatatttctatttttagtagagatgtggtttcaccatgttggccaggctggtctcgaactcctcacctcaggtgatccgcccaccttggcctcccaaagtgctgggattacaggcatgagccaccgtgcccagcccaggcagatctcttgatcccagttcaaggctgcagtgagctgtgatcacactactgcactccaacctgggcaacaggtccatctgagtccatctctaacggtcccagggaggtcactcccctgcaaggaggctactgtggcccccaacatcccattcagagattcagaagctgaggataagggaggaactttgccctgtcacccagaagtcagggtgtgaattaactttaccggtcaccaacctttttggcagcagggactggtttcatggaagacaatttttccacggaccaggggtggggatggtttcaggatgattcaagtacattacttgtttttgtttgttttttgagacagtcttgctgtgacacgcaggctggaatgcagtggcctgatcacggctcactgcagcctggacctcccaggctcaagcaatcctcctacttcagcctcccaagtagctgagactacaagtgcacaccaccacccacagctagttaaaaaaaaatgtataggccaggcacagtggttcacgcctgtaatcccagcactttaggaggccgaggcgggcggatcacctgaggtcgggagttcaagaccagcctgaccaacatggagaaaccccttatctactaaaaatacaaaattagccaggtggggtggcacatgcctgtaatcccagcaacaagaacgaaactctgtctcaaaaaaaaaaaaaaaaaaaaaaatttgcagagatccctatgatgcccaggataaataataaaaccttttttttcttttttgagacagagtctcactctgtcacccaggctgcagtacaatggcgtgatctcagctcactgcaatttccacctcccaggttcaagggattctcctgtctcagcctcccgagtagctgggattacagacgcctgccaccacacccaaccaattttttgtatttttggtagagacagggtttcaccatattggccaggctggtctcgaactcctgacctcaggtgatccgcccacctctcggcctcccaaagtgctgggattacaggtgtgagccactgtgcccggccaaaacgcagtctctaaaaacataattaaaaaataattaaaacagggtgagtctgagaccatcccaggaaacctggcttccactgcactgaggaggaagccacagtgggtgggggtccccagacctgggaatgggaaggcactgcccaagctctgctcttcttccaagaatcctgatgttaacgcagactccccaccccagccctgctgcccctgctcccaaaaagcaagcagcacagtagctgcacacagggctgggtgtccatgtcccaccttctatgggctgggctctcatggaggaggggctgcagcagcgaccccaggctgcccaggccaagggagacagagacccagaggcaggcggaggatgtgaagcaactttaattgccaccctcagacggggcagcaggagtgtcttaagcacagggccgttctaccccctgggagctgcctggggccagcccctcagttctggctgtggcaggttccccatcctagctccccggatctccatagggagtgtccagggaccctcaatctccagggccacttctgcaggagctcgggttcgaggttccacgtggccagaagagctcaggtctctgagggctggtgtgcccgggtacccatccgcatcactgctctcctcctgtccggctacgcccagggctgagtgacggtggtggcaagtgcttgtcctcagggcagcgaggtcttctgttctgacagcagcagggactccttcatggccaccagtaaccccagtgggcggaggcgctcctgggctcggagccaggacaaaaggaggagggtggcggtgaccaggcttgcactgagcaccgctgtggggaacagatggacagaggagtaaggagggggaaggcaagagcccccacacccaccaagctccatacacatggggatgggagttctgcagctcatccctccccacccacctcccctgaatccccggagctctaagcccccagcatgggagggtaagtccctcttaccagcagctgcaataaccccataggcagttgggcttccagactggtctccggcagaggaggatgtggcattcccgacagaggggacactctccagggtcacagggggccccatggttgtggcattcctgagagaggtgacactctccagggtcacagggggccccatggttgtggcatccccttccgggaggatctcattggttcctgcaataagcccaggcgttcagtagttgaggagagagcactgaaggcgtgagggggccagatgcccaggggagcccttggggtttatcctcaaccaaccaggctgggtgaagctgactgcccgtaattatgtctttttttttttttttttttggagagggagtctggctctgccacccaggctggagtgcagtggcgcaatattggctcagtgaaacctctgcctcctgagttcaaacaattatcctgtcttagcctcccgagtagctgggattacaggtgcacgccaccacgcctagctaacttttgtatttttagtagagacaggatttcgccatgttggccagactggtctcgaacacctcacctcaggtgatctgcctgcctcggcctcccaaagtgctaggattacaggcgttagccaccgtgcccggccttttttaaatttttttgagacagagttttgctgtcacccagactggtgtgcagtggcccaatctcagctcactgcaacctctgcctcccaggttcaagcggttctcctgactcagcctcctgagtagctcggattacaggtgtgtgccaccatgcccagcaaatttttttgtacttttagtagagacggggtttcgcagtgtttgccaggcaggtctcgaaatcctgacctcagatgatccgcccacctcagcctcccaaagtgctgggattacaggcgtgagccaccgggcccggcccctaatgatgtcttgattcccccacagggatgcaggcacgggcaaaggcatgtgtccacgcccccagcctggccacgccccagcaggcagtgggtgtccccatctacccacgagtccaccccagccccgcaggtgcataccacagccgagctcgtcgctggagtcgggacagtctgggtggccgtcgcagcgccacgtgagtggaatgcagtcatcgctcagcgtgcaacggagctcgcctgctaggcaggccaggcggctgcagttgcgcagtttcttgtcagttcccccagagcagtcactgacgccggtgcaggggcaggggaggccagggggcggtgggcattgccctttctgggtacatggctcaatccctggggcacagggttggtcaggtcccaaatgcccacccaagaaggcccaggtactccctgaaaccccatcccctgcaagccccaccctctaagaacagctgagcccaaaaaaatgctcccttcctaaggctccgccccctgcaactgttaactccactttctaaggacaggcctccctgcaagctcttcccctgagaccccactagctctaccttcctacaagcccactttattctatttgtttgtttgtttctttctttattttttcttttgagacggggtctccctttgctgcccaggctgcagtgcagtggcgcaatctcgactcactgaaacctctgcctcccagggtcaagtgattctcctgccttagcctcctgactagctgggattacaggggcctgccgccacatccagctaacttttgtatttttagtagagatggggtttcactgtgttggccaggctggtctcgaacgcctgacctcaagtgatccgcctgccttggcctcccaaagtgctgggattacatgtgtgagccaccgtacctggctccctccctctctctttccttcctttctttcctttctttcatttttcttttttttttctttttctttttttttcctgagacagtcttactctgttgcccaggctggagtgcactggcacaatcctagctcactgcagcggcaacctcccaggatcaagtgatcgatcctcccaccctagcctcccaaagtgctgggattgcaggcgtgagccactgcgcccagcccaagcccatcttagaccccgcttcttatgacccacagacccaagtcgcacccatccctgcggccctgcctttcccacaagctccacctccgcgtgcctggcccctgacaaaccaccctcaggccccgccccctgtaagccccgccaaggggcgtggccactcactgcactcctcctcatcgctgccatcgctgcagtccaagtccctgtcgcagcgccaggtgaggggcacgcataagccactggtgcggcactggaacttggtgggtgggcacgagcctgagctggggcctgcgagatggatgcaaatgaagcctgggaagctggaggctggacctttctccaagagcacagtagtcactggctgtgatccgcaggagacaggcgaagtcccgggatataggaaccacactggcggctgcttgttactgagcccctagtacgagtggggttcagagtgtagcagttcctgggctcaagagccccactgggcaggtgctactgcactccccaggttacagagaaaggaaccaagaggaggccatacagctggtggcagaggctgggtgcagtggctcacgcctgtaatctcagcactttggcaggccgaggcaggtggatcacttgaggtcacgagttcgagaccagcctggcctacatggaaaccccgtctctgttaaaaatacaaaaattagccgggcgtggtagtgcacgcctgtaatgccagctactcgggaggctgaagcatgagaatcgcttaaacctgggagatggaggttgcaatgaaccgaaatcatactgctgcactccagcctgggcgacagaacgagactccgtcaccacaaaaaagaaaaaaaaaagagctggtagcggagttgggcttcgaactcaggtctcgctgatcccagagtcttcaccaggctcctcatagcgagatgatctgccagggagacctccaaactcagtggttaaagagactgagggacgggccatttttccacatgccctgggtcaggctcccgggctcaggtcagcagggagggtctatctcctctgcgtagcaaaagggaaactgaggcagtgggtgggaaactgaggcactgggtagaaaatctgctcagtcaccaagtcctgttgccccgcctcctgaattcctcccagacctatcactctccccatcctaaatgtgtcagctcctcaccagagccccaggccccaggccccaaggtccattaggacaccagagacttgcctttccctctctcctccctacaccctgtgttttcccctcaattttcagatctcagctgatttcctgggagggttctcatgtccctcttggagacctaggaagcactgcctcccatgtctaacaactgtccttaaagccctggtcatgcctgtccacccacagactggacattctgtggaggtcagggctgtgacctggccgcctaaacccagggcagtgcctgattataagtggacacaggtcacataagggtccaagctgggtccagagaagatcccggctgtcctagattctgagcagggaagctcagctgcttgccgacctggaggggcacggaggggcccgcaacctgggccaagggacagaggaagggagtggcctttacggcttcctcctgggtgcggccaggggaggtggcaaatccgccaccctggcttagcttcactctgccaaggcctttaacctcttccacctttacccaccagccatgagcctccaaccccccactccccactgccagcccctcctcggccttcaggcctaattgcacctacttgccacagggtccctgagctctatggatcccagaagagctgtggacaaaccggtgcctgcttccttccccgcccccgggagatctggcagcctccaggtgtggctctccacccaggcgcagacttccacagccctgacacctctgacctcccttcgctggactgcgggagtgtgtatccctctgcaaagtggacagtagagcacagcagtccccgcctcatagggtgtaagcctgacaggagttacagtgaccagtgactttctctcctggcctcagtttcctcacctgtaaacggggtatgctgggaatccctacctcaacatcctgagaaaaaagagactgtgtatagagttttgtcctgtaatcccagcactttgggaggctgaggcggacagaacacttgaggtcaggagttcgagaccagtctggccaacatggtgaaaccccatctctactaaaaatacaaaaattagccgggcatggtgacggtgcctgtagtcccaagctactcgggaggctgaggcatgagaattgcttaaacccgggaggcggagggtgcagtgagccaacattgcactgcactccagccagggcgacagagggagactcaaaaaaaaaaaaacaaaaacttttgtacttggttaacgtgaacgctgcctccttaaaaaaaaacaaacaaaaaaaaacccaggaacatttaacgtgaatgtcagggactttgggatgagtccagggacctagaagtgcggaatgcacaaaggagctgggaaagtgtgtgagcctgagcccagggctgcaagttgggagtgcctgagtgcacagggaggccactccaaccctccagctgcctctaggggtatcagagagggagcccgtccccactggccaccaatacctcttaggccagggcgaacacgtccacgggggtatattcaacttgtgaccccagtctctgcgagagcctgcagtagcatgggggggagagacctcgcgttctctaaggatggaggacaaaggaggagagactgggagggcagggacggttgcggaacggtcacaaggcctgggcgcgagggtttggaaggcaaaggtgcgagaggcaccaggtgacccgtcctgcgtgattagcggtcggacaatctgagcctgctaagagctttcctgaccacgctggtatgaagggcggcttggaggtgacaatgggggacgacagggcacagcaggtgtggagacggtgtgcagggccggagcaaaaccgttaaaggcaggtggagacaccctcctcccctcccccagcatggggtcttcctagcaccagtgcgcgccttcccacaagcgatgaagtccaagtccacgtgctgggggagtgtcatgaactgacgtgcggtgcagccagtgactaggcgttgtcggtgcgcggcggcggggcgaagcctcgcgaggggtgggagcccgcgctgcggggcgtcactcacctgcggcctgggcagaggtcggggtggaaagcgggctcgcggcggcctccaggcctagtccgaggccgagcagcagcagcagcgccaggcccagagcccctgttcgccacgctccaacctgcgccatccaaccgccgctcatgctgtccccacagcggcgccggccacgcgctgtccagaccgctctcttatccctgcgcacgcgcacgcgcggggttggggcggggcccaagcccctgagttctgcggcgcccgcggctacgcgtaccgtaaatgtcagaatagcagggaaaagagaattagaggcccgtccccactttccccagtgaccagatcagttgaaaggtatggagcccgcttgaagttagaaacttctggggatgggaaggaatttgttggtgttcatttgcattatttcccgttccaaatgaggactgctgcaaatgttactgcctcgtgatcttctttaatatggcagccacgcccctcaggcactccgcatttcctccctcatcccactgcttttgtggcgccgacaggtaatttattttatttacttattctggtttgttgtccgagtccccatagaatgctagctactggagggcagggatcttctgttgctcactgctttattctcaggatctgacacatagtgcttgactcatagtaggctcttagtaaacatttggtgagtaaatgaataaatgaaacgtccattctcggagtcgggttgcttgggggggaaaaaggaaaggaaatcaattaattaattaaatttaataataaaggccgggcgcggtgggtcacgtgtgtgatcccagcattttgggaagcagaggcgggcagatcgcttgagcccaggagttcgagatcagcctgggcaacacagcaagtccccgcccgcctcaagaaaaaagaaaattagctgggcatggtggctctaatttgtagtcccagctactcaggaggctgaggtgggagaatcacttggggctgcactccagcgtgggtgacagtgagaccccatttgttagaaaagttggccggcgcgctggctcacgcctgttaaccccagcactttgggaggccgaggcaggcggatcacgaggtcaggagttctaaaccagcctggccaacatagtaaaactcccgtctctaccaaaaatacaaaaattagccgggtgtggtaacatgctcctgtagtcccagctactagggaggctgagatgggagaatcgcttgaacccgggaggcggaggttgcagtgcgccgagaccacatcattgaactccagcctgggtgacagagtgagactctgtctcaaaaaaaaaaaaaagttgtggtcataaaacttggttcagatgccgtcagcggcatgccttgcctagggtcttgccctccttgtggcctctgcacaccctgcctagtctttccttccctcctgacctttctgaatctgattcatccttttgccccaagcagaatcccaccttctccaggaaggtgttagcctttgtaggacccactctgggacactggtacctgctgcctgtagccgtggcctttccccttccagagggcagggcggtctcagcaccctcttggtccacagctgatcttttttagctgctgaagggtctggggctgtgccctggggaagccatgacactcccctgcgtagggtcactgggtggctcctgcagccagacttggacaccctccctttgcagatttctgtctcctccccaggaaccagctgccttccttctggggcgaattcattcttatcccacagccccagcataatgggatctggctcagggaggcctttcctgatctgccctaggtttgccttccctgtgagcagcccttactgtcctctgccttccccgttgagctgcagggtgaccatggtcaagcaggagcctcagtgggaaggtgctgaggaaggttcatgtgagaagtggctgtgggagccctcaagagatggaagttaggccaggcgcggtggctcacgcctgtaatcccaacacttcgggaggcagaggtgggcggatcacttgaggtcaggagtttgagaccagcctggccaacatggcgaaaccccgtctctactaaaaatacaaaaattagctgggcttgtggcaggcgcctgtaatcccagctactcgggaggctgaggcaagagaatcacttgaacccaggaggcagaggttatagtgagccgtgatcgcgccattgtactctagcctgggcaacaagagcgaaactctgtctcaaaaaaaaaaaagaagtgagaagtctgtggctggcctactgagtgtccgcacatacaccccttaccccacctgactggtcttcacaatcaatgctccccaacagccagcggtcctgggagtccaacctcccagaaggatcacccactcccaccactctcaaggtcagagcctggcctttgggggaaagggcagtgctgtctccagggcctctgcacccagggacagtgtctgtcccacccctggagtgccaacagagttgggagactcagcactgacttcaccccaaaatccaagtaagctgggtattgcttaaaatcaggggccaggcgtggtggctcacacctgtaatcccaacactttgggaggccaaggcgggcggatcacctgaggtcaggaatttgagaccagcctggccatctctacaaaaaaaaaaaaaaattagcgggtatggtggtgcacacccgtagtcccagctactcgggaggctgaggcagaattgcttgagcccaggaggcagaggttgcagtgacctgagatcgtgccgttgcgttccagcctgggtgacaagcgcgaaaactctggctcctgcagccagatttctatctcctccccaggaaccagctgccttccttctggagctaactcattctcatcccacagccccagcataatggtttctggctcagggaggcctttcctgatctgccctaggtctgccttccctgtaagcagccctcactgtcctttgccttccccgttgagctacagggtgaccaaggtcaagcagaggcctcagtgggaaggtctaaaaaataaaaataaaatcaggccaggtgtggtggctcatgcctgtaatcccagcactttgggaggtcaaggcaggaggatcgcttgaggccaggagttcaagatcagcctgggaaacatggtgagactctgtctctatttttttattttttaaagtaaaactagaagtgatacctgagctctacgtatttgtcataaattaggtcacattctccctggaggaaatccaaggaggcaaagtagtcgggtggccgtgagggtgcagtgtcacaggtaaggctggtccgaggacagctcccacctctttatgggaggagctggagtcaccgccttcttctcagtggcagctacagcagagctggaggagggaaagacttcagtgagggtttccaaagaacagtgtggaaagatctgagggagcccacacctgccccgggacaaacacacccacagggactttctggacctgcaggacagacagcagggtgttccagaatgccaacccctccaacgcagcccctcagaggatcagccaacgccaggtgggagctagcaagcctcctctctcccctgagccctgtatgaaccccctgctgtggcccccaggcccagaacccactgtggagagctgggctcctcccttcccacttttggtctccagcgtacacaaggcccccacccccattcctgctgcccctcaaaacaggatgctggcaaaagggccaagcgatcaggtgacaatggcctccagctattcctgcctcagactgggcaagaactgcatggcaggcgctactgtgtgggcgcagagccaggaagatggggcaccgccctcaggaagactcaggctggtggggctgagaatccatgcgcaaatggcaactgcaaaacgcatctctggcccagagctggccaagagggagcccccaggagaccctgtgccggcaagtccaggacgagcaccctcccctctcaccccacccacctgagcctgtggagctcacacacttcacagcctaagcaagaaaggaagcaggagggtggggtgatggaggaggcgccccaggggtggaggcacaggacctcccaggagcctcaaggaaatggaaaaggcagaagtggcctccctgggaaatgcacacatctctgggggcatggcaaggggctgtgtgggaacaaggtatcttgccacactctggtgctggactccagtgaatcagaaggtgacaacaaggaccactccactgagttccttctttttgagacagactcttgctctgtcacccaggctggtgtgcagtggcacaatctcagttcactgcaacgtccgcctcccaggcttgagtgattctcttgcctcagcctcccaagtaactgggattacaggtgtgcaccatcactcccggctaatttttgtattttctttcttgtttattatttatgagacagggtctcactttgtcacccaggctggagtgcagtggcgcaatctcagctcagtgaagcttcctcgacctcccaggttcaagagatccttctgcctcagcccttcaagtagctgggcctacgggtgcacaccaccacacccggctaatttttgtattttttgtagagatggggtttccccatgctgctcaggctggtcttgaacttctgggctcaagcgatccacccgcctcggcctcccaaagtgctgagattacaggcgagagccacagcgcccctaacttttgtatttcagtagaggcagggtttcgccctgttggccaggctggtgtcgatctcctgacccctagtgatcctctcacctcggcctcccaaagtgctgggattacaggcgtgagctaccatgcccagcctaaaaaatttctaatagagacggggtctcgctgtgttactcaaacaagtctagaactcaagcaatcctcacacctcagcttcccgagtcactgggattacaggcacacaccactgcgcctggcctattcacagagttcttttttttttttttgagacagagtctcactctgtcacccaggctggagtgcagtggcgcgatctcagtgagctgcaagctccgcctcccgggttcacaccactctcctgcctcagcctcccgaatagctgggactacaggcgcccaccaccacacctggctaattttttgtatttttagtacagacagggtttcaacatgttagccacgatggtctcgatctcctgacctggtgatccgccctccccggcctcccaaagtgctgggattacaggcgtgagccaccgcgcccagacctcacagagttttaagtacagagcaggccctgcctgacctcatcacctcccagatctcagcacactgcaagtctagcatccctattttatatgtgaagaaaccaaggctcaagaaggctgagggactgcccacaccgtgagttggctgtagagcccagaccccaacaggagtccaggaaaactggtttgaaatcctgcttctgcttactgctgcctgtgtggcccaggccagtcacttggcttctgtgagcctcgatttcctcttctgcaagaggggtcatcaccatctaactggtggagttattaggaggtaggcaggacactgactctgtgccaggctccaagagtttacaaatattaattatgaggactaaccctcgtaacagctttctgaagtagatgctattagagtccccatttaattaagagaagacacctgaaaccagggaccaaactgctttttgagaggagcccaaggtttatacacttctgtctctgagaagaatacatggctgggcatggtggctcacacctgtaattccagcactttgggaggccgaggccagaggatcacatgaggtcaggagttcaagaccggcctgaccaacatggtgaaaccccatctctactaaaaatacaaaattagcctggcatggtggcatgcgcctgtaatcccagctacttgggaggctgaggcaggagaatcacttgatcctaggaggtggaggttgcagtgagccgaaatcgcgccactgcactccagcctgtgcaataagagtgagactgtctcaaaataaataaataaaataagaattcataattatatcaacagtaatgtctcagtttctcacaggacccttggagggaccccggacttcatctgttttgtaggatgcagagtcctggctgaggcgctaacttctaccctcccctgggttggactaaatgagctcttgctgagcatggtgactctcacttgtagtcccagctactcgggaggccaaggcaggaggatcgcttgagcccaggagtttgagaacggcctgggcaacaaagcaagaccccatctctacgaaacatttaaaaattaacccagcatggaggccgggcatggtggctcacgcctgtaatcccagcactttgggaggccaacgcgggcagatcatgagatcaggagatcaagaccatcctggctaacacggtgaaaccccgtctctactaaaaatacaaaaacttagccaggtgtagtggtgggcacttgtagtcctagccactaggcaggctgaggcaggagaatggcgtgaacccctgggaggcagagcttgcagtgagccgagatcacaccactgcactccagcctggtgtggggataagaaagagaaatcagattgttaatgtgtctgtgtagaaagtagacataagagactccattttaatctgtaatcttacccccaaccctgtgctccctgagacatgtgctatgtcaactcagagttaaatggattaagggcagtgcaggatgtgctttgttaaacagaagctggaaggcagcatgctccttaagagtcgtcaccactccctaatctcaagtacccagggacacaaaacaccacagaaggccacagggttccctgcctaggaaagccaggcattgtccaaggtttctccccatgtgatagcctgagatgtggcctcgtgggaaaggaaagacctgaccgtcccccagcccgacaccggtaaagggtctgtgatgaggaggattagtaaaagaggaaggaatgccctgttgcagttgagacaagaggaaggcatctgtctcctgcccttccctgggcaatggaatgtctcggtgtaaaacccgattgtatattccatctactgagataggggaaaaccgccttaggcctgaaggtgggacatgcgggcagcaatactgctccttaaggcattgagatgtttacgtgtatatgtatctaaagcacagcacttaattctttacattgtttatgatgcagagacttttgttcacgtgtttacctgctgaccttctctccactattatcctatgatcctgccacatccccctctcacacatcacacccaataatgatgaataaatactaagggaactcagaggccgggtggatcctccgtatgctgagcgctggtcccctggtcacccgatttctttctctatactttgtctgtgtctctttcttttccaagtctctcattccacctaacgaggaacacccacaggtgtggaggggcaacccaccccttcagcctgggcgacgcagggagactccatctcaaaacaaaaacaaaaacaaaaacaaaacaggccaggcacggtgggtcacgcctgtaatcctagcactttgggaggccgagtcgggtggatcacaaggtcagttcaagaccagcctggccaagatggtgaaaccccgcctctactgaaaatacaaaaattagctgggtgtagtggtgggcacttgtaaccccagctacttgagaggctgaggcagagaatcgcttgaacccgggaggtggagattgcagtgagccgagatcacaccactgcactccagcctgggtgacagagtgagactccgtctcaaaaaaaaaaaaaaaaaaaaaattgacccagcatggtggcactaatctgtaacaccaattactggggaggccaaggaaggaggggaggatcacttcagcctaggcgttcaaggctgcagtgagtgatgattgcgccattgcacttcatcctgggcaacagagcaagactctgtctctaaaaacgagtaaatgagctctcggacaaaaagctcccagcagcacagttcctgcgcaactgatgcttactaagtaggatcttgacaagcaccctttccacaagttgggagacagagtgggttgcaggagggggcatgggggctgtggtgagcagcgctggagatcctcacctctctgctggcttgcctgacaccagcgccttctgcgacgacatgatgatggaagggggcacagattcccggcggccatcgcgagtgcaatagtaattgttggagagcttgtggctaggacccacagggagcttgggaggaggctgagttctgaggggaaaaaagatgagcactgaagcaaagagacagtcactgtcatggccccgctgtgggcccctgtcacctcagtcacaaaatgtgggatctacagccagccactgggataagccacaggctgggggtgtcccttggtacactggcagggacatatgcctggggaggggtcctggggccagaagcagatggtggaccctgctctggatgtgaagatgccacccccagggaccccacctgtcccaaatgtggagggtacagaggaccctttctgaggctcccaaggcccgggacatgtccccatgccccccaccccacggctgagcttggcagccagcctcacttgactttgtccactctgagtggctttttcccctaaagccaggctctggacgccctgcgtttcctgttatctcaggaagtctctggagaaccctgctaggatcaaggcccattattcaagaacaccttagccttggagcctgtcaagatctctgcatttcctgccaccatgtggccaggcaactcctctctggagcccagagaggggtgaacagagctcggtcttggcttgaactaaaccctgggctggatttacctggaagcctgaggccttaaaagaaatgctcaaaacaaggatgggcagggtggctcatgcctgtaatcccagcactttgggaggccgaggtgggtggatcacttgaggtcaggtgttcgaaaccagcctggccaacactgcaaaccccatctctactaaaatacaaaaattagccaagcatggtggtgggaggcagaggttgcagtgagctgagatcacgccactacactccagcctgggcgacagagcgagactccatctcaaaaaacaaaaaaagctcaaaacaaaagacgggctttccagagagagggaggagagaagacagcaaaaaccgtaaattgatctgtttccacttagccatgtttctaagtcacttttttgtctgggaactgtttcccggaatttaatttttttctgaggcagtgatcatatgcactgcagcctggatgatatatgcaatcatatgatcgcttgaggtgtgatcatagctcactgcagcctcaacctcctgggctcaagcaatgctcccgcctcagcctctcaagtagctggaactacaggcgcacactaccacatctggctaaaaacaatttttctattgtttttgtggagtcgggggtcttgctatgttgcccaggttgatgtcgaattcctggccttaagttatcctctcaccttggcctcccaaagtgctgggattacaggcgtgagccaccactcctggcctttttcttaaaacaagtgttagtcactgtattttttaaaaataagaaacataaagtaaaaaatgtttaatattaaaagcaatatattatgtgaaagactttgcttaaggaggctggatgtggtggctcataccttgggaggccaaggtggaaggattgcttgaggccaggagtgttttttttgtttgtttttttttgagatggagtctcgctctgtcgcccaggctagagtgctgtggtgcgatctcggctcactgcaacctccgcctcccaggttcaagcgattttcctgcatcagcctcccaggtagctgggaatacaggcgtgtgccaccatgctggctaatttttgtatttttagtagagatgggttttcactatgttggccaggctggtctcaaacttctgaccttgtgatccgcctgcctcggcctcccaaagtgctgggattacaggcatgagccaccatgcccagtcagaggccaggagtttaagaccagcttgggcaacatggtaagaccttgtctctatacaaaaatttaaaaattagccaggcacggtaacatgtgcctgtaatcccagctacttggtacgctggaccaggaggatcacttaggcctggaagttcgaggctgcagtgagctatgattgtgccactgcactccagcctgggtcacagaaacccagtcttacaaaaaaaaaaaaaaaaaaaaaaaaaaaaggccaggcgcggtggctcacacctgtaatcccagcactttgggaggccgaggcgggcagatcacgaggtcaagagatcagaccatcctggcaaacatggtgaaaccccgtcactactaaaaatacaaaaattagctgggtgtggtggtgcacgcctgtagccccagctactcgggaggctgaggcaggagaatcacttgaacccgggaggcggagattgcagtgatctcagatccgccactgcactccagcttggcgacagagtgagactctgtctcaaaaaagaaaaaaaaaaaaagaccaataaaacatccagatgaatcactagagggtgccgtcatcctaaaaaagtcaaaactttcacaaagccatttcctcaactggcccacaactaccctgatagaaagccaactaggggggtcgggggttgggggggagagagcatcaggaagaatagctaatggatgctgggcttaatacctaagtgataggttgatctttgatctttgcagcaaactaccatggcacgtttacctttgtaacaaaactgcaaatgtaccccagaacttaacgttaaagttgaaaacaagccgggcgcagtggctcacacctgtaatcccagcactttgggaggccgaggcaggcggattatgaagtcaggagttcgagaccagactggccaacatggtgaaaccccgtttctactaaaaatacaaaaaattagtcaggcgtggtggcacatgcctgtaatcccagctacttgggaggctgaggcaggagaatcgcttgaacccgggagatggagattgcagtgagctgagattgtgccattgcactccagcctgggcaataagagcaaaactccgtctcaaaaaaaaaaaaaaaaaaaagttgaaaacaaagtttgatacttctaatatttggaattagtcacaacatataggcatttacataaatttcattattttaatgctatttttcttcctttcattataatcctcaatgactgccttacctctgcctaccctttgacttcatagattataccattatccctttccctcaatgggttccatccatactggcctccttccactcaggctctgtccagcctgacactcttagcccttcctgttccctctgctcagaatgttttttcttttttatttttttgagacagagtgttgttctgtcacccaggctggagtgcagtggtgcgatctcagctcactgcaatatccacctcctgtgttcaagcgattctcctgcctcaacctcccgagtagctgggactacccgcgcgcgccaccacgcccggctaatttttgtatttctagtagagagggggttttactgtgtttcactgtgttggccaggctggtctcaaactcctgacctcgtgatccgcctgcctcagcctccccaagtgctgggatcacaagcgtgagccaccgcgcccggtcagaatgttttttcaataattattctttgaatgggtccttcccatcattcaggggactcaactgtcaatttccaaagaaagatctttcccaatcatctgactttacgtagccaccctccagcttccacttattttgttttgtcttcaaagcattccagaacaatactacctgctgtgtttgtttccctactatgcttctccctagaatgtggcgtccatgaaagaatgtggataagaactttcctggttcacaaagttaaacccaaggctgaggtcatacatgacgggggcttgtaaatatcaactaatattttaatataaatgagtctgaaatcaggacacttctgggttcaagtccccgctgccactttttagcttctgagtgacttgaggcaaatgatttcgcctctctggacctcttttttcatctgtagcttggggataacactgactaacatggccacgctgagcactgcaaatctagcctgattgccagtcagaatgcacgcccggcctcgctgtttcaggagggctgtcctccggagttcagcaaggttaaaggcaaacctctgcctccacagcctggcaggggactggtggcaggatgtcagccctccgtttcaggggtctaaaggaacacagatttcgtttttggtggagaaaggacagagccagaggctgggcagcgagcggggcctgctcaccgcttggagatctcctggtagcgtagctgcagcttcccctgcaggtcatgctgtgggaagaggagaggagaggtcggcctgcaaggcaccccaggagagaggaaaggagagggcaagggaccagggatggtccggggatgcgcattttaagggaaggcaggggatgaacactcggggaaacggatgtgggtcctgcaggtgaagagcaaagccagagtccgggcccacagatccaaggctaagaaggtcggggactggggaaatcccaggcctgagtggttcccaggccaggagagggtcccgggctgaaggggtgactagctgggggttcccagggagattcggggagagcgaagggtcccggcttaggagggaggtgaggagcaggagcgggtcccggacacacggagcccgaagccccccatggtgcagccctgtccgccccgcgcaccccggacgcccagttccgcagccgctggatgagacgggtggcggacgccatcttccgtccgcgatactgaagggcgcagccggtgacgtctccaccgctggggctgctgggaaagacgcggcgtggtatcgcgagacgggagtgggcggtgctagaacgtcctataaaggctctccccgaagcacgtgactcctctccgccagaccgccgccgcgccgccatcatggacaccagccgtgtgcagcctatcaagctggccagggtgaggtgggggcccgaatttgggggcagggggagggattagaggagccaaacgggccgggtctgaacccagcttctttcctccaggtcaccaaggtcctgggcaggaccggttctcagggacagtgcacgcaggtaatcgggtgggggcatttggccgactgccggcgacctaaaccctgatgtgacctctaccctgccctaacccctgccagccggaatccgggagccgattctcatttcatcacggggttctgatggttccctttaacgatctgtattctggccccgacacgttctctgaattcatatctgcttcccactccgcggtgcctttccgcggcccgcccttacttcttcctccactccggtggggacccgtaggtgcgcgtggaattcatggacgacacgagccgatccatcatccgcaatgtaaaaggccccgtgcgcgagggcgacgtgctcacccttttggagtcagagcgagaagcccggaggttgcgctgagcttggctgctcgctggtgggtgcaaagaggacacccctttgatagacctttggttggtggtagggaggcttcgttaagcccagggtgagagggtttgggaggcagagtctacatacagagactgacaagagggaggcgggagtttgccaattgctgcggggcctgtcaacatctcatgtttgggtctgtttacagggtcttggatgtcgggttcgaccacttggccgatgggaatggtctgtcacagtctgctccttttttttgtccgccacacgtaactgagatgctcctttaaataaagcgtttgtgtttcaagttaactcaggttcttgtctgggttatacgactagggtttctccaggtttcttgagtggctcccaggcggtcaccgatcctccgcactctggaaatcctggccgtgcggtcttgccaaacgaagcttttcctttttgaggcggggggtcgtgtttgtcgattgcaccctctaccccaaacaaaacacaagcgtagtaggaatgttttattagcaaagaagtttcagagagtgggtggatcagggctctatcacttggtccccacctcaccttggtggggccagagtgagccccttcctgccacagtcaccccaactgaaattgcctttctcttcggccagtgttagcctctgagcaggggaccctggacccttctgtgcgccaaaggctgaggtgactgacgaggagatctccccacagctaggtgtagtgagccagacgaggcagcttactgaacctgggggttctctccattgtcaccgcattctccttcaccaggtgtggctgtctgggagccagggggtgactcgctctggagagaggggaaaagaggggggcctgctgcaatctccttgaggcaggaaacgtgggattcagccccagcctcacttagtggaggttcttttaccatggacccaggctgcctggtttgtatccaacctctgccccttctgacctggaagaggcgcttgaccttcctcccacatcccttccagtggggtgagtacaggtgttcctcagtttacaatgggttacattccggtgagtacatcataggttgaaagtattgcaagttgaaatgtgtttaatacacctaatctcccaaacatcacagcttagcatggtccatcttaagcttgttcagaacgccttagcctgtagttggggaaactcgtctaacacgaagcctgttttaataaagtattgaatgtcttatgtaatttattgaatactctgctgaagtgtggtttttactaagcacacattgcttttatgctatcatgaagtcaaaaaattgtaagttgtgccaggcgcgatggctcacagctgttgtaatcccagctacttgggaggctgaggcaggagaatttcttgaacctgggaggtggaggttgcagtgaactgagattgtgccgctgcactccagcctgggtgacagaacgagactcttgtcttcaaatgaaaaaaaaaaattagctgggcatggtagcacgtgcctgtagtcccaactacttgagaggctgaggcagaagaatcgcttgaaccccagaggtggaggttgcagtgagctgcagtcgccccactgcactctagcctcggtgacagaggaagactccatctcaaaaataaataaaaaatggtaagtggagccatggtaaattggggtcaacctgtacaggatgagtgggctgattagataacttggattatgaaagtgctaaaacatcctggcacttggccatcagagtatagtggtgttgggggttaatgtgttctgcaaactcacccagtctccagttctgaagctctggacccccttccccaccctgcctgatgccaaagggctcctttttcctttgataagagcctccctggcagtaggtaacaggagcccaggggcatgcatgaaaggtcttagctaggtctctgtgaccttaggttacttccccccttgaggactcagtctcatgacctggggtagtgtcaacctcactggggttttgctgctttcacatcaaatcccagcccctgccaggcgctctggtttcacacctgtaatcccagcacttgaggatgctgaggcagaaggatcccttgagctcaggagtttgtggctgcagtgagctctgatcacaccactacaccccaacccgggttacagagtgagaccctgtctcccaaaaaagaaaagcagccacataggagaatccagacactggttctgcacccctggtgccacctttggggagcagaaagggaggctcagggcatatttactatcctctgcaaactgaatttgcagctgggaaagtttgtttcttccagagctgtgctcacctgggtgtcgggctggcccgagctcaggtgggcatgtagcagagcggccacctcatcctgctcagcctccagggcgatggccagggcactggtgccctcctgtggaacgttagggacagtcagatccctgagccaagccatgggcaccccccaagatgccagccccattgtggggtcttacattgtccaggatggcagggtcacagcctggctgggtgagcagcagccgcacggtgtccaggcgcccatactcactggcacacatcagcgctgtggccccatccgcatcctgcgcattcacatcagccccacacgccagtagggttgccaccatgtcctgtcggccatggctgatggccagcatgagggctgtctgccccgtctggggagtggggaggaagagggaacaggctggggtaggctcagggaagggaggtcacaggttgactcccaaagtggaagtgactcctggctgagagccacagtgggggcgcccacgcacctgactggccttggcattgacatcacccatgcagaagagtctctggaccacagccatgtcctcctcttcctgcctcacagaggtgagtgcagccagcatgagggccgagtagccggctcggttctggcggttgacctcgcaggcccctgggagagaaaagggggccgtccacggagatgccaacaccgcggcccgacttgatccactcacctccctgcaagcctcgggcacagcacctgcatatggggtggtctcaacgttctccccacaatagctacctggttcctccctcactaaggtgttgctcaaataccatctgctcagtgaaggaccttcctgtttcatcttttttttttttttttttttttttttgagacatagtctcgctctgtcacccaggctggagtgcagtggtgcgatctcagctcactgcaatctccacctccggagtagctggaactacagcatgtgccatcacacccagctaatttttgtattatttagtagagacagggtttcaccatgttggccaggctagtctcgaactcctgacctcaagtgatccacccaccgtagcctcccaaagtgctggaattagaggcatgagccactggcccagtggctatttcaaatcaagtccctgtttcaaatcaggcagggacttggttttgtttgcttctgtatccctcagtacttagaacaatacttggcacatagtagatgctcagttaaacatttgttgactgaataataaaaggatatgtttattttcatggccaccacccgccaagccaccatcattgctcccctaaagaacagtgccagcctccacccttctctctgaatccactccaggttccacacagcagccaggagcaactatttatttatttagagatggagtctcattctgtcgcccaggctggagtgcagtggcacgatctcagctcactgcaacctctgcctcccaggtttaagcgattcttctgccttggccacttgagtagctgggattacaggcatgcaccaccacgcccagctaatttttgtatttttagtagagacggtttcaccatgttggtcaggctggtctcgaactccgacctcatgattcgcttgcctcagcttcccaaagtgctgggattacaggtgtgagccaccgcgcctggccaagagcaacaattcaaaatgaatttggttgccaggacactggctcacgtctgtaatcccagcactttgagaggccgaggtggttgatcacttgaggtcaggagttcgagaccagcctggccaatgtggtgaaccccatctctactaaaaacacaaaaaatagccaggcgtggtggcaggcacctgtaatctcagctactcaggaggctgaggcaggataatcacttgaacctgggagctgcagtgagccaagatcacgccactgcactccagcctgggtaacacagtgagaccctgtctcaaacaaacaaacaaaaacacctgccaacaccttgatttcagacttctggccacctgttgtaaaaaaaaaaaaaaaaaaaaaaaaagccaggtgcagtggctcacgcctttaatcccagcactttgggaggctgaggcgggcggatcatgaggtcaggagattgagatcatcctggctaactcagtgaaaccccgtctctactaaaaatacaaaaaaaaaaaaaaaattagtcgggtgtggtggtgggtgcctgtagtcccagctactcaggaggctgaggcagaagaatggcatgaacccgggggacggagcttgcagtgagccgagattgcgccactgcactccagcctgggtgacacagctagactccatctctcagaaaaaaaaaaaaaaacctgccaacaccttgatttcagaagtctggccacctgttgtttgaagcagctcacagtgatactttgatggcagccctaggaagcaaaacagcctggtcaacactgcctatcctgaatgaaacacaaacgtgagctcagtttcctctgggatcagttctgttaccatcctggtccctgttcctcacagtgcctgtttggatgatatttcctggagtggctgttttaatccctgtctcctgccattctgaaggctctgaggattgaggtagtttaaggaaatgaatgagaagcttggggaaaggagcggggtcggggtcatgagatggataacctagtgaggaaggagagctgagatgagggactgaggagtaaagggttaagtcaaatgacagcaaaaatggaggccaggcatggtgactaacgcctgtacacccaaatgcttagggaggccaaggcaggaggatcacttgaggccaggagtctgaggccagcctgagcaacataggaagacccccccatctcttaaaaaatttggccggacacggtggctcacgtctgtaatcccagcactttgggaggccaaggcaggcagatcacaaggtcaagagatcaagaccatcctggccaacatggtgaaacaccgtctctaccaaaaatacaaaaaattagccaggcgtggtggtgtgcgcctgtagtcccagctacttgagaggctgaggcaggagaatcacttgaacatgggagacagaggttgcagtgagccaatatcacaccactgcactccagcctggtgacagagcgacactctgctccccgccaaaaaaaaaattagctgagtgtggtggttcatgcctgtggtcccaaatactcaggaggctgaggtggaaggatcgcttgagcctgggaggttgaggctgcatcacgccactacaccccagcctggaacaaagctgtctgtaaaaaggggttggggggacgttccctgtttgggtggcatgctgtgtgggtgtccatgccttccactaagacaccgtgtaaggcgtcaggtggtcagggaggagcacccagaaataaccagagtggggtccttgcaggctagccaaggacccacctatcttcctgctccctctcccttttctcttgcagctaccttgaccttgcttaactaaagaatcaccctggctaggcacagtggcttacgcctataattccagaacactggaggccaaggcaggaggatcacttgagctctggagttcgagaacagcctggacaacagagcgagacctcatctctactaaaaatacaaaaattagccgggtgtggtggagaacgcctgtaatccccgctacttgggagactgaggagggaggatcaattaggcccaggagttggagatcagcctgagcaacatggtgaaaccccatgcctacaaaaaaatttaaaaagaatcaccctttgttgacttcatcccctggttgtcttctgctacggcccttactagcatttgaaattatttcacgtttttacttgataatcgtctctctccactcttcactcaccacccccaccacacacacacacacacacacacacacacacacacacacacacacactcaaaactacacattcctgaaagttctgtgggagcaggcatttattcaacacttgacggtttgctgtgggtttgtcaggcaggcaggtagggtcgggtgagagaggggtatggagaagaatccacaacaggctgaaggaggatgacagaggcaaagagacaaggggtgggggcagtgaaacggagagggagcagtgggtaattgtccccgcaaggtccaaggattactggagttggggaatgggagcctgtgagccgagaagctgggaggtgagggtcgggaagtggggagctgagaagtgagattctgtaacgggcacaactattagggacatcaaggtctggggctgatgttatacctgtaaagctgatgtggggcagagtcaaggtcaaggaaggagagcagccaggaggttgcagggatcatgggggaggatgttgaaattgacaagtgggccgagcgcggtggctcacgcctgtagtcccagcactttgggaggctgaggtgggcggatcacgaggtcaggagatcgagaccatcctggctaacacggtgaaaccccatctctactaaaaatacaaaaaaaattagccgggcgtggtggcggacacctgtagtcccagctgctggggaggctgaggaaggagaatggcatgaacccgggaggcagaccttgcagtgagccgagatggcgccactgcactccagcctgggtgacagagcgagactccatctcaaaaaaaaaaaaaaaaaggaaattgacaagtgccggctgggtgcggttgctcactcctataatcccaatactttgggaggctgaggcgggcagatcacctgaggtcaggagttaaagaccagcctggccaacatggtgaaaccccgtctctactgaaaatacaaaaattagccgggcatgatggcgcttgccagtaatcccagctactcgggaggctgaggcaggagaatcactcgaacccgggaggcagaggttgcagtgagctgagatctgagatcacaccactgcactccagccaggcaacagagcaagactcggcctcaaaaaaaaaaaaaaaaaaaaaaaaaagactaactatagaatgctctggaaatgcaatcttgagataaggaggaactgactggaacagcctaggctctgttcctgtccccatctagaaacaggttgtcctttaatgcattagcccagcaattcctgttccccagggtataaaacctagagtgggccgctttccagggtccctcacctgccgtgcaagtggggcacctgcagaccagattccatacaccttgggcagccttcctgagccttgggggattggctcactgtcaatcttaggcttctgctgtcccttgctgcctatctgtaaataaggaacctgctttgtgtaacttgttatgtgaatgagtattctaccttaccagactcaggcaggtaggaaaagcacattcctaggtgcaatgggctgaaggggtaaccagtgcacagtggacctgctttgcagcaaggattaggctggagggagagagggagaactggccaggagctaaagttcaagaaaggaggagctacttgaggtcagaggtagaagccagagaggcagagtgaggaggggcctagtcagtgacaagatgctccaaggtagggtttgagaaggaagagggtgaaaggtctggaagtggagaagaagagcaaagtgcacacccacgtacctccagactctggattccaggggatgaaagaggaaacagcccctgaatgcaggggcgttagtgtatgtgacagcaagcaagtacaggcagaggggagatgagtaagaaccaggggaaggtctggagaggtggagccaaatgggaattagaggctgggcacactggctcacgcctataataccagcactttaggaggcctaggcaggaggatcacttgaggtcaggagttcaagaccagcctggccaacatggtgaaacccatctctactaaaaatgtaaaaattgtctgggcacggtggctcacacctgtaatcccagcactttgggaggctgaggcaggcggattacctgaggtcgggagtttgagaccagcctaaccaacatggagaaaccctgtctgtactaaaaatacaaaattagctgggtgtggtggtgcatgcctataatcccagctactcgggaggctgaggcaggagaatcacttgaatctgggaggcggaggttgcagtgagccgagattgtgccattgcactgtagcctgggcaaaaagggcgaaactccatctcaaaaaaaaaaatacaaaaatacaaaaattagctgggtgtggtacacgcgcctgtaatcccagctactcaggaggctgagacataagaatcacttgaacccgggaggtggaggttgcagtgagctgatattgcaccactgcagtccagcctgggcaacagagcaagatctgttcgaaaaaacaaacaaggccgggcaaagcggctaatgcttgtaatcccagcactttgggaggccgaggcaggcagatgagttgaggtaagcagtttgagcctggccaacatgttgaaaccccgtctttactaaaagtacaaaaattagccgggcgtggtggcgggcgcctgtagtcccagctactcgggaggctgaggcaggagaatggcgtgaacccgggaggcgtaggttgcagtgagcagagagatcatgccactgcactccagcctgggcgacagagcaagactccatatcaaaacaacaacaacaaaaaaggggtgggggggggattcaaatgtaggagataaaggggccaaggagcctggggcctcttgcagtgaccaacgacgcctacttccttgccgcagccccagccccctttaaggcatgagatgcccaaaaaattcacttagattcattcactgtcccctgtctcctacaatgccccagcttccagagcagctatatcctttcctaggtcataaagacctgcagggatgggagggatctgcgtgtttagggggttgggggcaggcagtgggacccgcctcaacctgcagttagtaccagaggtgcccaaaggctgactcagaggtttctgaacctgcaggagggtacctggagggagggggctcctggtggacagcgatttgtttaccacccaccagaccctttgtgcccagtttatcagggcaagcagctggaggtgggtggggcacagtgccccatcccaggaggagtcagagccctgcctggtgagtacctcccctccaggctggacactggggctcaggaactcggtgagtgctccagctggagattcagggacagagcacatgctggccatttactgatctcgtactacctgtattatcataggtacccagggagggaggccttgccaaccccatttcacaagcaagattaaataatgcccctaaactgaggtttacctaagtccagaactgtgtattccctccagctgcaaagtaggaggagcctcagggcagaactaggggtatggtggggccaaaaggcctctttttttttttttttttttttttttttttgagatggagtcttgcattgtggcccaggctggagtgcagtggtgctcactcttggcttactgcaacctctgcctcctgggttcaagtaatcctcgcacctcagcctcccgaatagctgggattacaggttcccaccaccacgcccagctagtttctgcttttttgttttgttttgtttttgtttctgagactgagcctcactctgtcgcccaggctggagtgcagtagcacgatctcagctcactgcaacctctgcctcccaggttcaagcaattctcgtgcctcagcctcctgagtagctggaattacaggcatgtaccaccacacccagctaatttttgtatttttagtagagatggggttttgccatgttggccaggccggtctcgaactcctgacctcaagtgatctgcccacctcggcctcccaaagtgctggggttaaaggcatgagccaccatgcctggctcagagggcagaaggcctttgggaacccagacaggaagaggtttaaaacccaaggaggttggctgggcgcagtggctcaggcctgtaatcccagcactttgggaggccggggcaggcagatcacgaggtcaggagatcaagaccatcctggccaacatggtgaaaccccgtctccactaaaaatacaaaaattagctgggcatggtggcgcacatctgtagtcccagctactcgggaggctgaggcaggagaatcgcttgaacctgggaggcggaggttgcagtgagccgagatcgcgccactgcactcctgcctggtgacagtgtgaaactccgtctcaaaaataaaataaaataaaataaaataaaataaaataataaaattaaaataaaataaaataaactcaaggaggagtggtgccctgtgctggacagccattctctgctttcctctccagagtctttgagcctaggtcagcccctgccctctccccccacccatttcctggtgtcccacccaccctcccttggctctgacccgtatccaggagcaggcttgcgatggccaggttcccgtgggacacactgtagtgcagggccgtgttcccgttgccatccgccaggttcaccacgtgcgccagcagttcgggtcccaggcgcctcaccccttccagcatcctggccacgggctccgcctgagagcgccgctggctggacactcgaaaccactcctgggccacgaggcgcactgcgccctgcaagggacaggggccaagataacatcggcgatggtccacggcggcgccgtggtgggggagctggggaggggcgggactgggaagagacccatttggcgtttccaggcaagtaaggaaggtcactcctcgtccaggtggggagccatgcgaacccagatggagggctggggccacacccctatcggagggcaaacacgggggaagggggtcctttccttccagggaagaatttgcgggagaacatggaacggggaaaggcaatgaacgcttgcccttggggagtccgggagtggggctggggccgggcctttttggggaaaccaaggaaagatcggcgctgtcctgggaaggagatcccttcggagagcctggggtcaggcgaggtgcctggcgggaagggatggaacccggtgtgctcccctaagtgggcgtcagaggtccttggaggctcccacgccactccctggtgctgcgctcccggggcactcacgccgtcgctggctactccgcggggccggctcagctgccgctgcagcgctacgcacgcctccctcagacgcgggctcagctcgcacctgcagaggaggccaggagagactcaggatggatcggggacagcgccgaccaggaggagggcagccgcctcctctccaaacaactagcgagcgccgctcacctcccctgtgccacctgctgaggctctgcctccgcctcgggctcagggtcccggatgtccccgccgctgggagggccaggggtgcccgagtcggatcccccgccgctgtcatccccggagcccgaggagctacccgggggctcggcgccaccgttctcgctgtcgccatcgctgtcgctggcgtcctcgctggaggagctctcgtacctgggggcagggtgggaggtgtctgctaaacctcccctgtgggctcgttctggagtcctgcgatgtgggtgtggccgttcccatttaacgatgaggaaactgaggattgcccagaccacgctgccagtagaggggcagagctggggttccaaccccagtctatgtcccggcagaagctgccacaggaggggaaaggcgctcactctccgttgaggaccccaacaaactgcaggctcttgggtccggagctgggttgggcaccaggtgtgccgtctctcttcttcatgatggatttgaggatgcctggcggggatgagatgagggcactgagttcgagtccggcgccgagtaagccagggcccagcgacggggtcgggactcacccgcgggcgccacggccctgtctccgtccatggatccgggcgagctctcctgagtcaaggagggcgcctctgccggggactcggtctgcgcggccttttcggcacagctccacggggtctgggtggtggcctcgcgtagctgggcccgggcccccgccgctgcctcctccgcagcctcgcgggcttcctccagctcccgcaaccggccccgcagaagctcactcaccccgcgctggtgctccagactggcgcgcagcagctctagctcgcgctcggcggccgcaggcagccccagcagcgcctcggtcacccacgcgtccgcctccacggtctcgggggcagcctccacgccggcctcccgggtctccggcacggcctgggcacccgcttctcgggtctcgggcacggcctcggcggccacctcccgggtctggggcgtcccatcgagactcccgacctccccgtcgaggacctggagcgcgccctcgctgcgccctgcagccaggccgtctgggctgtcagcccgggggctggccctggcacggccgccgcgctcggaggtggccaggcgctcggtgagccgccgcagctgggcgagcttgtccgggcgcgtctcagcctccccgtccggctcgggctgcgcgcgcccggccagcagccgcgccttctcggcgcgcagcgcgcgcacctgctcctgcagctcgggcagcgttcgcgcctggtcctcgagctcgcgcaggcgccgcagcgccgcggccatctgctcgcgcaccagctgcagttgggcagggccgggcgaagcaggggcaaggttaggggcggggctgctgcggccggacccgcgtgggctgcgcgggaccccgcggccggggctgggcgcgcgctcgtgtgtctgcgccagctccagccgccggctggtctcccggagcgtgtgctcgacgcgcgggttgcgcacgggcgcgcgcggcgacagcggctgcatcaggagccccgagggcgcgccctgggagagtatgcccggtgctccaccgtcgtcactggccagggactcgctggatgtccaggcgcctgggctacgtgcgcccgcgaggccgggccggggcgcgcggggacggcgcgaggtcgggggtcccggggcgcggcgggcagcggggccacgctccagctcctctatgtacttgaggaagtccaggtccaggtggaagccgtagggcgtctccaccgagtagggcgagctcgggctgcgtgcgcccccggcggcggggaccgggcacaggcgggggccgcccaggtctggaggcacgacgggggcacggggagggcgcatcagaacggggaaacccgggagatactaaacaaaccgagcgtgtcccccacccatgcccacgcttcacacctatctgtacccaagtattaactcaatcgcttgtttaatgagcacctactctgtgctaagcaagtttctaggcccgggggacacagcagtgagcaagacaaacatccctgtcctcctgtagaaagcagataagcatccttccaaacgatgcctacggcaatggtaataataacagggaataaacggaggaggcccgatttagcgtttggttgccagggaagctttcctgtgaggggactttcctgtggagtggagccctggcccggcgtgtggttcgcgcctgtagtcgcagcattttgggaggccggcacaggcggatcacctgaggtcaggagttccagaccagcctggccaacatggtgaaacccagtatctgctaaaaatacgaaaattagctgggcggtagtggcgcgcgcctgtaatcccagctactccggaagctgaggcaggagaatcacttgatcctggtaggcggagtttgaggtgagccgagatcgcaccaatgcactccagcctgggcgacagaagagaacctctcaaaaaaaaaaaaaagtagccctggccgggcgcagtggctcacgcctctatctcaacactttgggaggccgaggcgggtggatcgctagagcttaggagttcgagacaaacctgggcaacaaagtgagaccccatctccaaaaatatatatatacacatatacatatatatacatagctgtgcataatggtgagctactcaggaggctgaggtgggaggatcacttgagcctgggaggcagaggttgcagtgagccgagattgcaccactgcactccagactgggtgacagagtgagaccctgtctcaaaaaaaaaaaaaaaaaggttggcgaggggaagccctgcacgatgaggaggaagcagctgggaaaaggtttctagaagaaaacagcccatggaaataccctggggtaggagggaggagggtcagctggagtcacagcgagatggagaccagggtgtcccgagcagagtaaagaaggcagggggaagaggaatggacgcacaagggccacacttccctggtttgagggctacctggggtggcagggggtatagtccacttgcgattagtgccataggtggggtgttttttgttttgtttttttcttttttttgagacggagtcttgctctgttgcccagactggagtgctgtagtgcgatcttggctcattgcagcctctgcctcccaggttccagcaattctcctgcctcagcctcctgagtagctgggactacaggcacgcgccaccatgcctggctaattttttttttttttttttttttgagacgcagtctcgctctgtcgcccaggctggagtgcagtggcacaatctctgctcactgcaagctccgcctcccgggttcaagccattctcctgcctcagcctcccgagtagctgggactacaggggcaccaccatgcccggctaattttttgtatttttagtagagatgggatttcaccgtgttagccaggatggtcttgacctcctgaccttgtgatctgcccgcctcggcctcccaaagtgctgggattacaggcatgagtcaccacaccgagccgtgcctggctaatttttgtatttttagtagagacagggtttcaccatgttgcccaggctggtctcaaactcctgatctcaagtgatccgcccaccgtggcctcccaaagtgctgggattacaggcatgagccaccgcacccggccatgattgatgccataggtggtttaaagcaggctcatgacattggagaggactgcactctagggctgtaggctgcgtccacacacaagggcatcaagcgtttctctgtgcatgcgcacacacacacacatctctctttttgcacactcaccgggcaggttctgattcagggcaaacttggccatgtttcctgcagcagctgtcagaggcaccctgcaaaaggggtgaaggtggggctgggcgctgtccctctggctggagcctctggggcctgcctttgagtctaagcaaacaggacccaagagctctcctccacccagccacctccctccacacatggcctctccttcctcttccctaaagaaaccttgaaactttttttttttttttttttttgggacagagtctcgctctgtcacccaggctggagtgcaatgccacaatctcggctcattgcagcctccccctcccgggttcaagtgaatctcctgcctcagcctcccaagtggctgggattacaggtgcccaccaccacgcctggctaatttttgtatttttggtagagatgaggtttcaccatgttggccaggctggtctcgaactcctgacctcaagttatccgcctgcctcgacctcccaaagtactgggattataggcatgagccaccgtgcctagccgaccttgaaactttggatggaatgaatgatccccaggtgtcagatgtcagcctgctgggcaggaggaagcaggaaagacatcaagcaaaaagaagaaggtgaccaagaaaacaagggtagctgggagttggggaggcattccagacctgctgggttttctgataatctctggggaaaatcagaaatggacgctctatgtagtggactatgagcctttaggaaagaaagaccagagttggaagcccttcacaggatcattaaaaactcatctaggctgggcgcggtggctcacgcctgtaatcccagcactttgggaggccgaggagggcggatcatgaggtcaggagatcgagaccatcctggttaacacggtgaaaccccatctctactaaaaatataaaaaagtagccgggcgtggtggcaggcgcctgtagtcccagctactcgggaggctgaggcaggagaatggcgtgaacccgggaggcggagcttgcagtgagctgaggtggcgccactgcacttcagcctggcaacagagcgagattccgtctcaaaaaaaaaaaaaaaaaaaaaaaaaaggatgtaattgtgcatccaaatttttaccaaggtcagttgtgaaactcttgcaggaatgatggggaattgcgggctggatgcaccaaagatccaaatcaacaaatcaacggatacttgtctccctggaatgtcgctagcggagtgtcacaggcttgatccttggcttgtaagagtttgtaatgcaaacacaaaacacctgggttgtcagagctgtgactattcatggggctgcctgggaaagtgactgtttggatgacatgatggaggctgtaagaaagtgaggaagattgggccacatataataatgtgatatttaacaaggacaaatattgaatccagaactttggttcaaaaagcacagggtgaaatctcagcactctgggaagccaaagcagaaggatcgcttgagcctaggagtcaagacccacctgcgcaacatagcgagaccctatctctttttgtttttttttttttttgagacagaatttccctcttgttgcccaggctagagtgcagtggcacaatcttggctcactgcaacctctgcctcctgggttcaagtgattctcctgcctcagcctcctgagtagctgggattacagccactgctactatacctggctaattttttgtatttttagtagagatagggtttcatcatgttggccaggctggtctcgaactcctgacctcaggtgatccacccacctcggcatcccaaagtgctgggattacaggcatgagccaaggtgcctggccactatctcttttgtttgtttgtttttaaatagtgaaaccaccaagcacagtggctcacaagccattgctctccagcctgggcaacaagagcgaagctctgtctctaaataaataaataaaatagcgaaaccccatctctacaaaaaacacaaaaattagctggatgtgttggcatgcacctgtagtcccagctactcaagaagctgaggcaggagtatctcttgagtccaggagatgcaggctgcagtgagttatgatcatgccactgcattccagcctggttgacagagcaagaccttgtctcaaaaaaaaaaaaaaaaaaaaagaaaagaaaagaaaagaaaagcacaggaacatggagtgggaaagatgggctttggaaagcccacatggaaaaccttcagggaggggaaagtgcctacggtgtgcccttcctgattaaatgtcatcgccatagctggacacaatggtgcatgcctgtagtcccagctactcaggaggctgaggcaggagaatcgcttgaacctgggaggcagaggttgcagtgagctgagatcatgccactgcactccagcctgggggacagagccagactccgtctcaaaaaaaaaaaaccatatatatatatatatacacacacacacacacacacacacacacagcccccatacaacactttgcatactgcaaagtagtattattattcatattttacagatggagaaactgaggcacagaacaattaaatcagttgcctgtgggaagcaccctcagattgggctctgcccatctgcggaacccttgtcagcaggtccctgccacagcttctgactgccctttacctgtccagtcctccactgacaggcatctgccaaacccacttcatcctctccctgggccacggcccgtctgtgctaaccacatggcaacactcccagccaccccttctggcttctcgaatccctgggaccacctgtgtgcctgatgctatgaagcactgagcacccaccagccctcctgactcattaccctactccaccgctggggaaaccgtaactccatttcccacttctgtctggccgaggtccctgacctctcccttcccactccaaggccaggcagggggcctcttccagtccccaagcagctgtttcccgtcccttcacaccagctgcaaggggtggatcaacaggccagcgggtcatcgcagaggacagccaatgccgttcatcacttgttttcaggaaattgccagggaagaactgggttgtggaaaaagtccagatcaagggttggggggtctgggtctacttctcacacagctggccgtatgacgcaatggggtcagcgtcctcctccggtgacctggtcacacccaaatcccaggccctgggatctcagaagacagctgtgggccattcctaagacctaaactagctgaagcagttggatccagaggctgggctaagaaaggaatggatccctccagaatgtcaaataataacaacgcttttgatatttactatgggccagcctctagtctaaggaatttatggatatttactttttttttttttttttttagaggcaatgtctcgctcactctgtcacccaggctggagtcagtggctcgatcatagctcactgtggccttgaacccctgagctcaagtgatccgcctcagcctcacaaatagctgagactacaggaatggacctctacacctggctaattcaggctaatattttaaattttttggttttttgttttagatggagtcatgctctgtcgcccaggctggagtgcagtggcacaatctcagctcactgcaatctccgcctcccgggttcaagtgattctcctgcctcagcctcccaagcagctgggattacaggtgtgcaccaccatgcctggctaatttttgtatttttagtagagacggagtttcaccatgttggccaggctggtctcaaaccaggcgtgagccgtgcccggcctaattttattttttgtagatacaggtgtcttgctatattgcccaggctggcctccaactcctgggctcaagcaatcttcccagttcagcctcccagagtgctgggattacaagcatgagctactgcacctgaccttgacttattttttaaaatcctagctaaatccactgaggttggatttcctatgatcattgtcccttcccctattgtacagatggagaaactgagacacagaacagtttagtgtcctgcctgggtcctgtcataaacaggcagaggcaggttttaaacccaggcaggtcttccagagtccttgctttggccactacacttgaatgctttcttttatttttatttttgagacggagtctctgtcacccaggctggagtgcagtggcaggatctcggctcactgcaacctctgagcccagggttcaagcgactctcctgcctcagcatcctgagtagctgggattacaggcacttgccaccacagctggctaatttttgaatttttagtagagacgggtttcatcatgttggtcagtctggtctcaaactcctgacctcaagagatcagccctacttgacctcccaaagtgctgggataacaggcatgaaccaccaaggagcctcagggggcttgtccctcccagcctacacctgtgtcagactctgattgggggcggaggtgcccaccacctctgcggcttcaggggctggggcctcactaagtggggcgtttagctgccttccctctcctccgctccctgccctgactgtcacagctagatccggattctgtgcctgagaccccctcattaggccgtcagagccgacgccacacgccccctctcccgccccagggactattttgggacgcagagctgtgatcaccaaaccggagtggtgggggccacggcaggccagtgaggatcccagtcctggggagagggcgccttccaggaggccctgagtactggcagcccctgatgtctgctgggactctcagactcttgaggtgggtgggtgggggaccggtggcggcaggaaggtgggtgttaaagtcatcatcacccgtccacccccaggtcgtcctagccgcacagagacagagcagtttcctacaggaagcgccgccgggcggttccatccgctacccattgtctgcgggtccgggggccgtgcgtccctccccaaaacaccatttccgtgacacgctcccacacccagcccagcgcgaggggctggctggggtccccaggccgtcccgggaaagggtcccagggccggttgtggcattagggagcgaacgagccccgcagtgagctcccgaagggcgagaggggggcaagcccacgcctccagagccccccactctgctcgctacccacctgggacttccaatgtgggaggggtcccggccagaggacacgacgcccgccccgtcgcagcgggcagagccctcagtggggctggaaacgcagcgcagcgccgggtcccggtgcgtccccgaatccacccacccaggggtcccccatccgtgtccccgcaagctggcaatttacctgaagccgcagccccagccgcgcccgcacccgagcccgccccctcgaagtccggggactgattatcaaggccttcgccctaactgacggccacgccagccaaccagcacccgaggctctccaagccgcccagtgggacggtggggtgggacaggcaggcggggcctggaatgtaggggtggtgactgagggcgggccctggagtgacggtcgccgagcgctggctggcggcatttctgcaccagcagaggtcaagtctctgcccagcgccgggccaaggagcttggatttgatccacaggcacgagggagccatgggagaactatgagtagaagagtaacccggtgggatttctataactggcacttatttcgcagtgcctgggtgaagtatcaggtcccggatcttccccaccgcagggcctctgcacatgctgttccacctacctgaaatgctttcccttgcacctgtacacgtaggtactttttgaggctcccctactgttttttgttttgttttgtttttgttttttgagacggagtcccaggctggagtgcagtgacactcactgcaacctccgcctcctgggttcaagcaattctcctgcctcagcctcccgagtagctgggattacagacacacaccaccacgtccagctaatatttgtatttttagtagagatggggtttcaccatgttggccgggctggtctggaactcctgacctcaagtgatccgcccgcctcagcctcccaaagtgttgggattacaggcgtgagccaccgcgcccggccttccctactttctgaggttcagcttttgtgttgctgccccctaaattcctgacatagcccctccccagttagtatttttctcatcactctattgtattaacctaatagctacttttactatctggaaaaaaaaaaaaaagcagactctgttattggcaggcgcagtgactcacgcctgtaaatccagtatttagggaggcatagatgggaggatagcttgagccaggagttgagaccagcctgggcaacatagcaagacctagttctcaaaacaaaagaaaacaacaaaacaaaaagacaaaaacgaaacactcagttatttatttggtttattttttaatttaatttaatttttttttagacagagtctcgctctgtcccaggctggagtgcagtggtgcgatcttggctcactgcaacctctgcctcctggggttcaagcgattctcctgcctcagccttctaagtagctgggattacaggcgcacaccaccacgcccagctaatttttgtatttttagtagagacagggtttcaccatgttgcccaggctggtctcgaactcctgacctcaggtgatccgcccacctcagcctcccaaagtgctgggattacaggcgtgagccaccatgcctggctggttatttattggtttacctgcttgccatctcactaaagtgtcggcaccaaggccaggtggggtggctcatgcctgtaatcctagcacctcctgaggctgaggtgggaggatcttttgagcccagcagctcaagaccagcctgggcaacagagtgagactctgtctctaaattaagtgtcagcaccatgggaacaggaaactggttttgataactgctttatccagcgaccctagtacacagtagatgcttaataaatgtttgctgaaataatgttttctttttcttttttgagtcagggtctcattctgttgcccagggtagagtgctgtggcacaatatctcagctcactacaaactccgcctcccaggttaaagagatcctcctgcctcagcctcccaagtagctgggattacaagtgtgtgctacgcctagctaattttttttatttttagtagagacgggcttttactactttgcccaggctggtcttcaactccttggctcaagcaatccacctgccttggcctcacaaagtgctgggatcacaggcataagccacagcacctggccagaatatagtaatattttaaaatgtattttaacatctgatactttttaaaaaaaaacaaaattcctgggctattttaattggttgattctttcagttaaaactgtggaattctgtcgcgtttccccacagaaactccattggaattttcttctttgttcctttgagacaaagtttactctgttgccgatgctggagttctgtggcaagacctatggctcactgcagccttgaactcccagactcaagcaatcctcccacctcaacctcccgagtagctgggactacaggcatgtgctaccacgtccagcaggtttcttatttttgtaaggacagggtctctctatgttgcccaggctggtcgcaaattcctgggttcaagtgattctcctgcctcagcctccctaaatagtggcataacaggcatgagccgctgcacttggcctccattggaatgtttaaaatatatgtgtgtgtgtgtgtgtgtatatatatatatatatatatatatatatatatataatttttttttttttttgagacggagtcttgctctgtcacccaggctggagtacagtggtgtgatctccactcactgcaagatccgcctcccgggttcatgccattctcctgtctcagcctcccgaatagctgggactataggcacccaccaccacacctggctgtttttgtatttttagtagagacggggtttcaccgtgttagccaggatggtcttgatctcctgacctcgtgatctgcctgcctcagcctcccaaagtgctgggattacaggcgtgagccaccgcacccagccctaaaatatttttattgtggccgggtgcggtggctcacgcctgtaatcccagcactttgggaggccagggcaggcagatcacctgatatcgggagttcgagaccagcctgaccaacatggagaaactccgtctctactaaaaacacaaaattatcccagtgtagtggtgcatgcctgtaatcacagctacttgggaggctgaggcaggagaatcacttgaacctgggaggcagaggttgcagtgagccgagagtgagccattgcattccagcctgggcaacgagagtgaaactctgtctcaaaaaaaaaaaaaaaaaaaaaaaaatatatatatatatatatatatatatatatatatatatatagttgtaaaataaagcgtccatagatgcacacacacagcagattcaagaaaccacataaaacaaatgtatactctttccctaagtggcctgaggtaatctgggaaaatggttcgctatttacttgacccagagaaccccacaaaatcatgcaaatcaagaggttcaaatcttcatgttcacttggagaacactcatgaaactgcccaggccatcaagggtatgtatatatgaaaatccacgaagtatctgaaagatgtcactttacagaaactgtgtgtaccattccaacattacaatggtggagttggcaggtgtgcccaggccaagcagtggggctggacacaaagtcagtggcccagaaaaagtgctgaatttttgctgtacatgcttaaaaatgcagagagtggccgggcatggtggctcacacgtgtaatcccagcactttgggaggctgaggtgggcggatcacctgaggtcaggagttcgagaccagcctggccaacacggtgaaaccccatctctactaaaaatacaaaaattagctgggtgtggtggcacgtgcctgtagtcccagctaccagggaggctgaggcaggagaattgcttgaacccgggaggcggaggttgcaaagccgagattgtgccactgcactccatcctgggcagtagagcgagactccgtctcaaaaaaaaaaaaaatgcagagagtaatgctgaacttaagggttatatgtagattctctggtcattgagcatatccaagtgaacaaagtacctaagatgcgtcgccagacctacggaactccggtcggattaacccatgaatgagttctccctgccacactgagatgattcttactgaaaaggaacagatttttcctaagccagaggaggaggttgcccaaaagaaaaagatatcccaaggccgggcgcagtggctcacgcctgtaatcccagcattttgggaggccgaggcgggtggatcacctgaggtcgggaggtcgagaccagcctgaccaacatggagaaaccccatttctacttaaaatataaaattagccgagcgtggtggcgcatgcatgtaatcccagctactcaggaggaggctgaggcaggagaatcatttgaacccgggtggcagaggttgcggtgagccgagatcgcaccatcgcactccagcctgagcaacaagagtgaaactccatctcggaaaaaaaaaaaagaaagaaaaagatatcccagaagaaactgaagaaacaaaaacttatggcatgggagtaaattcagcattaaaataaatgcaattaaaagtaaaaaacaaaaacaaaaaacaaaacaaaaccaacaacaacaacaaaaaaccccacaaatgtatagtttaaggagttcctccagggggtagttctcaaccaggagtgattttgccccatgggagaatgtttgacaatatccaggagcacttttgggtaatgaggaggcgggtgtttttggcctctagagggcggaggccaggaatgtagctaaccaccctgcaatgcacaggccatccccaaggaccaagaattatgtggcctgaatgtcaagagtgctaagtttcagaaacccagtgctgagatgaaggtcatcgtcgcctccacccgggccaaccaactgcacttgccagctaccccagaagcgcctccgtggactatgtcctagtcacagctgcccctcactccctaagtaaccactgttttgtgacttttatttatttgtttgtttatttatttatttatttttgagacagaatctcgctctgttgcccaggctggagtgcagtggcatgatctcagctcactgcagtctcctgggttcaaatgattctcctgcctcagcctcctgagtagttgagattacaggtgcccgctaccatgaccagattttttgtatttttagtagagatggggtttcaccatgttgaccatgctggtcttgagctcctggcttcaggtgatccacctgcctcggcctcccaaagtgctgggattacaggcatgagccaacacgcccggccctgtgtaggtttctgtttgtttgcttatttatttatttcgagacagagtctcactgtattgttcaggctggagtgcagtggtgcaatcaatgctcactgcagcctggaactcctgggctcaaatgatccttagcctcctgagtagctgggagacaggtgagcgccactgcacatgtatagttttattatccaaatgtgaatctgtagacactggagtttagtcttgcccattcaaaaagaaaatgatatgtcttttaagctccccctgcccgtttttttttttttttttttgagacggagtcttgctctgttaccaggttagagtgcagtggcgtgatcttggctcactgcaacctccatctcccaggttcaaccgattcccctgcctcagcctccagagcagctgggactacaggcacaagccaccatgcccagctaattttttgtattttagtagagatggggtttcaccatgttggtcaggatggtctcgatctcctgaccttgtgatcgaccagcctcagcctcccatagtgttgggattactggcacgagccaccgcgcccggcctaagcctgtttatttatttatttatttatttttaattttatttttttgagatgcagtttcactcttgttgcccaggctggagtccagtggtgcaatcttggctcactgcaacctctgcctcttagattcaagcgattctcctgcctcagcctcctgagtagctgggattacaggcatgcgccaccacgtccggctaatttttgtatttttagtagagatggagtttctccatgttggccaggctggtctggaactcccgatctcaggtgatctgcccacctgggactcccaaagtgctgggattacaggtgtgagccaccgcgcccggcctaagcctcttttaattcacaggttcctctccatccctccctttcccttacaatagaagcattgcatgcctgggcatggtgcctcacacctgtaatcccagcactttgggaggccgaggcagcaggaacggttgagcccaggagttcgagattatcctgggcaatatagtgagaccccccatctctacaaaaactacaaaaattagctgggtatggtggcatgcacctgtagtcccagctactggggaggctgaggtgggaggatcgctcgagcccaggtgatcaaggctgcagtgagctgtgatcacatcactgcactccagcctgggaaacagagtgagaccctgtgaaagaaagaaagaaagagagaaagagagaaagggaggaagggaggaagggaggaagggaggggaagggaaggaggaaggaaagaaggaaggaaggaaggaaggaaggaaggaaggaaggaaggaaggaaggaaggaaggaaaaaaaaaaaaaggatcgcacaattggctgcttgtcctgaagtgtttcctatggtctaaatgttgctgatcctacactcattgtgtagttagttcaggatgttcttctgtccttggtattccctgcaaattggcggttgcttctagaactggggtcagactcagatttgattactttgacatgactactgatggcgttctgttctttcactaggaggcttgtgatgtttggctgtgcctcctttcctcagtccagtagccatcgagaattaactccttagagattacaaaatagtgatgtcatatctcttgtgtttcttccttctttatttacttatttaattttttttatgagatggaatctcgctctgtcacccaggctggagtgcagtggcacaatctcagcttactgcaacctctgcctcccaggttcaagtgattctccttcctcagcctccctagtagctgggattacaggcttgtgccaccacgcctggccatttcgtccttatttgttagttgaattcttttttttttttttatgcaagatacttcttcttatgtactatctggttttccagtgacacttttagagaagaaaggcaagataaaaacctgattattggccaggtgcagtgacacattccggtaatcccagcacattgggaagctgaggcaggaggatcgcttgagcccaggaggtcgaagttgcagtgagccatgattgagccactgtactgcagcctgggcaacagagtgagaccctgtctcataacataaaatcattatggctggcacagtggctcacgcctgtaatcccagcactttaggaggctgaggcggacagatcacttgaagccaggagttcgagaccagcctggctaacatggtgaaacccttcctctactaaaaacacacaaaaaatttagccaggcatggtggtgcatgcctgtagtcccagctactccagaggctgaggcatgagaatcacttctcttgaacccaggaagcagagattgcagtgagccaagatcacaccactgcacttcagcctgaaagacagagactctgtctcaaaataaaaaagaagagaaaggtaggagggtcagagttatagaaggtgttatgatggaagcagaggggtgtgtgtttgtgtgtgtgtgtgtgtgtgtgtgagagagagagagagagagagagagacagagagagagaaaaggagattggaaattgcggccagagtggtggctcatgcctgtaatcccagaatgttgtgaggctgaggcaggcggatcacttgagttcaggagttcgagaccagcctgaccaatatgttgaaaccctcgtctctactgaaaatacaaaaattggccaggcgcggtggctcacgcctgtagtcccagcactttgggaggccaaggcaggcggatcacgaggtcaggagattgaaaccatcgtggctaacacggtgaaaccccgtctctactaaaaatacaaaaaattagacgggcgtggtggcgggtgcctgtagtcccagctactcaggaggctgaggcaggagaatggcatgaacccgggaggcggagtttgcagtgagccaagatcgcaccactgcactccagcctaggtgacagagcgagactccgtctcaaaaaaaaaaaacaaaatttagctgggcattgtggcgtgcgcctgtaatcccagctcttcaggaggctgaggcaggagaatcacttgaactcaggaggcagaggttgcaatgggctgagagtgcagtattgcactccagcctgtggtggtgggcgcctgtaatcccagctactcagaatcccaccacaggtgctcagcacacagtagacactcaataaattttcactgaatggaaagattgaaaggtgatttcaagctccctgcagaccaagaatttctgaagagtattcctgcctagctagccagtggggagaggtataagaaagaaaaggggccgggcacggtggctcatgcctgcatgcccagcaatttgggaggttgaggtgggcggatcacctgaggtcaggcgttggagaccagcctggccaacatggcgaaaccccatctgtactaaaactaaaaaatgtatccgggcatggtgctgtgcacctgtaatcccagctactcaggaggctgaggcagaggtttcagtgagcgaagatcgcgccactgcactccagcctgggtgacagagcgagactctgtcaaaaaaaaaagaaagaaagaaaagagagacaaagaaagaaagaaagaaagaaagaaagaaaggagggagggagggaaggaaggaaggaagagagaaaggggggaaaagaagaaagaaaaagagggagggagggaaagagaaagaaagaaaaagaaggaaagaaaaaggaagaaaggagggagggagggaaggatggaaggaagaaagagagaaagaggggagaaaagaaagaaagagagagagggagggacggaaatagaaagaaagaaagagaaagaaagaaagaaggaaagagaaagaaagaaagaaaaggaattttgcttgcgtgggtgaggaagatgctcttagacctcttaaacaacttccctcctcccccacattcctaataccctgggtgttcatggtagaaaatgtgacccttctctctcccaccctgtcccaggctgaggcttgagtcagaaaagaaaagagagagggaggaggttcccgggcactccagaatacattgaaccccttgggagccactttcagctcctttgccattttaggggcctcctggaaactccaaggcacccctgcccccatctggaatgcttaactgcccagagagactgcgcctgtctctgaacagttttttttttttttttttttttttttttgagacagtctcgctctgtcgccaaggctggagtacagtggcgcgatctcagctcactgcaagctccgcctcccgaattcaagcaattcttcagcctcagtctctccagtagctgggattacaggcacctgctatcagcccagctaattgtttgtatttttagtagagacagggtttcaccatgttggcgaggctggtctcaaattcctgacctcaggtgatccgcccacctctgcctcccaaaatgctgggattacaggcgtgagccattgtgcccggcctgtctcagaacattgacacccctgacatgagagctaattggccccagtcaggagcttcaaaagacagcattggccagttgtggtgtgcatgcctgtaatcctagtgcctcgagaggctaagacaggagaattgcttgaggctgagagtttgagaccagcctgggcaacaaagcaagaccctgtctctagaaaatttatttatttatttttgagacagagtcttgctctgtcgcccaggctggagtgcagtggcgcaatctcggctcactgcaagctccgcctccagggttcaagcaattcccctgcctcagcctccctagtagctgggattacaggcacctgccaccatgcctggctaattttttgtatttttagtagagatggggtttcaccgcattagccaggatggtctccatctgctgacctcgtaatccacccgcctcgacctcccaaagtgctgggattacaggcatgagccactgcacccagcagacatttttaaaaattagctggggatggtagcatgttcccgtagtcccagctactcaggatgctgagatggcagaattgattgagcccaggaatttgaggctacagtaagctatgatcacgccactgcactgcagcctgggccaagagcaagactgtctcaaccggggtgcagtggctcacgcctataatcccagcaatttgggaggctgaagcgggtggatcacttgaagtcaggagtttgagaccagcctggccaacatggtgaaacctcatctctactacaaatacaaaagttagtcgggtgtggtggcgtgcgcctgtagtcccagctacttgggaggccaaggcaggagaatcccctgaacccgggaggtgtaggttgcagtgagccgagatcgcgccactgtactccagcctgggcgacagagcgagactctgtctcaaaaatcatcatcgtcgtcatcatctccacttcccccttgatttactcagtcttctcgagcctcccacagcgggcgggcagccgccaggaggccttgaacttcctctcaggcgcctgggatcagcgggaaaggagcgcgtctgagcggccagaacagctgctctcgagttcaccaccagagggcgctgctatctagggtaaaccccccggggccgcggttgtcaaaccgggtatatacagagaaggaattttcggggtggggggtagtgggggaatctatctctagctttttcttattgttgtaaaaataatttcccaaaaataaaaataggctgggcgcgatggctcacgcctgtaatcccaacactttggaaggccgaggcgggtggatcactggagatcaggagttcaagatcaacatggtgaaacccagtctctgctagaaatacaaaaattagccgggcatggtggccagcagctgtaatcccagctactcaggaggctgaggcataagaaccccctgaagctgggaggcataggtagtagtaagtcgagatcgccccactgcactccagcctgggtgacagaacaagacgctgtctcaaataaataaataaataaatcgtaaattacaaaacaatgacaagctttaaaaataggccaggtacggtggctcacgcctgtaatcccagcactttgggaggccgaggcgggcggatcatgagatcaggagatcaagaccatcctggctaacacggtgaaaccccatctctactaaaaatacaaaaaattagctgggcctggtggcgggcacctgtaatcccagctactcgggaggctgaggcaggcgaatggcatgaacccaggaggtggagcttgcagtgagccgagatagtgccactgcactccagcctgggcgacagagtgagactccgtctcaaaaacaaaacaacaacaaaattaaatgaaaaataaaataaaagaggtcacggttttgggcaccgttaattccagctagtgagcaggctgagatgggaggatttcttgggcccagtagttccaatccagccttggcaacacagcaagacatcccaccaccaccccacgtgccctcccccgccaccgtcttaaaagacagaaagagagattcaatggtttggaactaaagagaactaggttcaaatctttttttttatctctttttttgagatggattctggctttgtcacccaggctggagtgcagttgtgcgatcttggctcactgcagcctctgcctcctaggttagagcgattctcctgcctccgcctcccaagtagctgggaggtagcactcaccaccatgcccagctaatattttgtatttttagtagagagaagttttcaccaggttggcctggctggtctcaaactcctgatctcaggtaatctgcccacctcagcctcccaaattgctggaattacagacatgagccaccacgcctggcctaggttcaaatcttgacccttctgagctgtgtgactttgtccaaattcctaaaggtctcagaagctcaatttatctcctttcagggaccgacttgaggttgagataaaatggattacacaagtgtctgatggtgtaaaggtggcactaaataaatgtacgctgctacagttattatttccttagtgacttcatagctgtctgccctgcaatgtacaagttcccagactggaaggaattatggggaaaagctaataggggagggtggaaaggcaaccccgttcccttctgagcaccagcccagattctgagtcatcctttctgccctgagtgtttgaggtcctgctcttgggctgacctttcttggtgacctggatgtgagtacagtgtggcaggaagactgtggttagttgctgggggcggtagaggccagtcactggacacgatgtgccattacatagtcctaacaaccttgtgggcttgtctgagaagaatcctgcatgtctcaagccagagagaatttttcatgctcttccttgaacctgagtcatctatttcctgtacactttgtctaggactctgtcaagcatctctcagtcttaggacccctgctccaggaatccttacctaatgggattgacatcttttctatactcttctaggcctgtgtgcttaccccattgcagcattgaccatctaggattcaacttatgtagttaaatcttagcaccattcatggtgccaatgagcaaacagatatcatgtgcctcctgatatcatacactgagaaggacacaacatcactgccaaaaatacataacaggcaccttaaggggaagaaacatctgcatcagacaaatgcaaaatggaggacgtgctacaaaaaaccggtgtgtacatctcgaaaatatcagtgtttggccaggcatagtggcttatgcctgttgtcccagctactcaggaggctgaggtgggaggatcacttgagcccaggaggttgaggctgcagtgagctgtgatctcactgctgcactccagccttggtgacaaagtgagaccgtgtctcaaaaaatgccagtgccctgcctggtatagcgaatgcacctgtattcccagttactcagtaggctgaggcaggaagattgcttgagtccagatttgagaccagcctcggcaacataacaacgaccctgtctcagattaaaaaaaaaaaaaaaaaggaccaacaggatatgacaatgaaatgcagtggatgattctggatagggtcctgctcataaaaaacatggctgtgaggccgggcgcggtggcttacgcctgtaatcctagcacattatagtgtatccgggaggatcatgaggtcagagttcgagaccggcctgaccaacatagtgaaaccccatctctactaaaaatacaaaaattagctgggcatggtggcgtgtgcctgtattcccagctactcaggaggctgaggcaggagaattgcttgaacccaggaggctgaggttgtggtgagctgagatcatgccactgcattccagcctgggcaaaagagggagactcagttttttttaaaaaaacaaaacaaaacaaaaaacagctgtggccaggcacagtggctcatgcctgtaatcccaggtctgtgggatgccggggtgggaggatcgcctgagttcaggagttcaagtttgagaccagcctgggcaatgtaactaaaccctgtctctaccaaaaaataccaaaattagcctggtgtggtggcatgtgcctgtagtcccagctgctcaggaggctgaggcaggaggatcacttgagcccaggagttggaggctgcagtgagctataatcgcaccactgcactccagcctgaatgacagagtgagaccctgtctccaaaacaaaggaaaacaaacagaaacacaaaccacagctgttcaggtcatgcttgacacaattgatgaaactggaatatggaccatagattagataacagtactatgtcagggtcaaatttcctgaaattgctagctgtaccacggttatataaacacttttttttcttagtaaagggcaaaaggcacacgttatgtgtgcaatatatccttaagtgggtcagaaaaagaagatgtacaaaaaagtgtgtattatctcaccctgcatgagtgtattatataaatatataagaatacgtctctatgtgagtgtattttatctatctatgcacttatgcacttatgtattacgtatacgtgtgtgtgtgttgttgttgttttgtttcttgttttttttgtttttgagacagagtctcgctctgttgcccaggctggagtgcagtggcctcatctcggctcactgcaagctccacctcctgggttcacgccattctcctgcctcagcctcctgagtagctgggactacaggtgcctgccaccacgcctggctaattttttgtatttttagtagagacggggtttcaccatgttagccaggatggtctcgatctcctgacctcgtgatccacccgcctcggcctcccaaagtgctgggattacaggcgtgagccatcgcgcccggccttttttttttttgagatggagtcttgctctgtcacccaggctggagttcaatggcgcagtcttagctcactgccacctctgccttccaggttcaagcgattctcctccctcagcctcccgaggagctgagtttacaggcctgagccaccgtgccagacctcttttttttttttttttttttttgggacagagtctcactctgatgcccaaatgggagtgcaatggtacgatcatagcagactgcagcttccacctcctgagcttaagttgtcctcttgcatcggcctccttgagtacgtgtgggagtacgggtaggcaccaccacacctggctaattttttattttatttatttttttatttttatatttatttatttattttgagatggagtttcgctcttgtcacccaggctggaatacaatggcacaatcttggctcactgcaacctctgcctcccgggttcaagtgattctcctgcctcagccccccaagtagctgggattacagatgccaccatgcccggctgatttttttttgtattttcagtagaaatggggtttcaccatgtcagccaggctggtcttgaactcctgacctcaggtgatccgcctgcctcggcctcccaaagtgctaggattacaggcgtgagccgccacgcccagccctaatcttttattttttggagggatggggtctcactttgttacccaggctggtctgaaatccctgatttcaagcaatcctgccacttcagtctcccaaagtgtcaggattacaggtgtgagacaccctgcccagcctgtttgtgtatgttatatatatgtatctctctgtatgtaagtgtggctctctccatatatgtatatatatatctttatgtgtattgcatatgtatgtgtctctgtgtgtattatatatatttatattttatgtctctatgtgtgtttatttattttttggatacagggtcttgatctgtcccctaggctagagtgcaggggtgcaatcttggctcactgtagctttgagcctcgacttcccaggttcaaatgatcctcccacctcagcctcccaagtagctcatactacaggaatgtgccaccacgcctagctattttttttttttttgagacagagtcttgctctgtcacccaagctggagtgcaatggtacgatctccgcttactgcagcctccacctcctgggttcaagcgaatctcccacctcagcctcacaaatagctgagattacggccacacaccaccatgcctgctaatttctgtatttttagtagagatggggtttcaccatgctggccaggctggtctcgaactcccagactcaagtgatccacccacctcagcctcccaaagtgctaggattacaggtgtgagccaccatgccgggccccagctaatttttttttttttttgagacagagtctcgccctgttgcccaggctggagtgcagtggcgcaatctctgcttactgcaccctctgcctcccgggttccagcgattctcctgccccagcctcccgagtaactgggattacaggcgcgcgcctccacgcctggctaatttttacatttttagtagagaccgggtttcaccatgttggtcaggctggtctcgaacttctgacctcacgatctgcccaccttggactcccaaagtgctggtattacaggcatgagccaccgtgcccagcctggccccagctaattttttaaattttttgtacagacagggtcttgccatgttacccaatcttgaactcctgggctcaagcagtcctcccaccttggcctcccaaagtactgggattacaagcatgagccaccttgcctagcttaatggcatttacatttgtagtgaaatacacataacaggctgggcgcagtggctcatacctgtaatcccagcactttgggaggccgaggtaggcggatcacctgaggtcaggagttagagaccagcctggacatggcgaaaccccgtctctactaaaatacaaaaattagccaggcgtggtggtgggcacctgtaatcccagctactcgggaggctgaggcaggagaatcatttgaacccaggaggtggaagttgcagtgagcagagattgcaccactgcactccagccttggcgacagagcaagactctgtctcaaaaaaaagaaaaaaaaaagaaaagaaaagaaaaaaaagaaaaagaaaaaaagaaatatacataatataaaattggtcattttaacaatttttaactatgttggccaaagtagcccacgcgttgggattggagacccggtcttgcccaccgtgatcgccccagtacagtgcctggcatatagtaggtgctccaggaacaattgatcaggatgactttgtctttgctgggtaagaggccacattctaaaggtcagtttttggccaggcacagtgactcacacctgtcatcccagcactttgggaggccgaggcgagtgaatcccttgagctcaggagttcaagaccagcctgggcaacacggcaaaaatcctgtctctacaaaatctacagaaattaggcaggtctggtggcacatgcctatagtcccagctgcttgggaggctgaggtgggaggatcacttgagcctgggagtttgaggttgcggtgagctgtgattgtgacactgcactccagcctgggtgagtgagacccatctcagaaaaaaaaaaaaaaatacataaaacagggctgggcgtggtggctcatgcctgtaatcctagcactttgggaggctgaggtggtggatagcctaagcttaggagtttgagaccagcctgggcaacatggcgaaaccccaccccctctactagaatacaaaaaattagcgggcgtggtggtgggcacctgtagtcccagctactcaggaggctgaggcaggagaatggcgggaacctgggaggtggagcttgcagtgagccgagatgaggccactgcactccagcctgggcaacagagcaagactctgtctcaaaaaaaaaaaaaaaaaaaaggctaggccaggcacagtggctcacacctgtaatcccagcacgttgggaggccgagacaggtggatcacctgaggtcaggaatttgagaccagcagagccaacatagtgaaaccccgtttgcactaaaaatacaaaaaattagtcaggtgtggtggtgcacacctgtaatccccgctactcgggaggctgaggctggagaatcgcttgaacctgggaggcagaggttgcagtgagcggagattgcgccgttgcactccagcctgggcgacaagagggaaactccatctcaaaaaaataaataaataaaataaaaaataggctgggcgcggtggctcatgcctgtaatcccagcactttgggaggccgaagcgggcggatcacgaggtcaggagatcgagaccatcctggctaacatggtgaaaccctgtctctattaaaaatacaaaaaattagctgggcatggtggcaggtgcctgtagtcccagctactcgggaggctgaggcaggagaatggcactaacccgggaggtggagcttgcagtgagccgagattgcgccactgcactccagcgtgggcgacagagcgagactccttctcaaaaaataaataaataaataaataaataaataaataaataaaaaataaagagcagtttttagaataaaatctagagccaacttgaggcgacagtatagactcttttgtagattgctcacagcaggtgcccttaagaccctgggtctgtgatgtgttttgtgctgtgggacacatggctccaaagaagtccctgaaaatcagatcatgaaaaggtcatcaggttggggaagtaattgatcagttctctcagtttaagaaggtggggaagaggaggagcttgcattctgggatagcctgggatagctgtgtccctactcagagagaggctgggggcttgggggtggacaggccagacggtgaccatctgaacctactcctcactggggttttcctccctccctttcctgtccactgctgctgggagggatttgctgtcctggcatctggcccagctgacggggccaagtgtatgagtggcagcctgcacgtcagcccttgggtgtgcagtttcagattccagagaatgagctggcttggagccctgctgagtcaatgcccttctccttgccagtgctctgagccaacctgccccgagttcttcctggcaggctggttttctgtgccagcctccccttcctgacagggtataggggaatgggtagggaagaggcagaggagatcggtgcaagtttgaatgaacacttagccctgtggaatgaatgtggtccagccctttagcctcactcagtacttcctttgtcccaactctatccctaccccaggctcagaatgttggggtatctccacctgcctgagaacttcaaacatacaggggctgggcttagagggcagcagcaccttcgttcagtgcatgagtgaatgaatgaatgagggagagaaagaggaaggtcttccatgtctgaaacttttttttttttttttgacacacagtctcactctgtcacccaggctggagtgctgtggtgcaatctcagctcactgcaacctccgtctcctgagttcaagcgattctcctgacacagtctcccgagtagctgtaagcacgtgccaccacacccggctaattttttatttttagtagagacgaggtttcaccatgttggccaggctgatctcgaacccctgacctcaggtgatccgcccccccccccctcccaccacccggcctcccaaagtgctgggattacaggcgtgagccaccgcgcctggccacagacttttattttatttcttttttagagacaggatctcactctgttgcccaggctggagtgcagtggcaccattgtggctcactgcagcctctacctcctgggctcaagtgagcctcccacctcaggctcccaagtagctgcgaccacagtcatgggcgaccgccctggttcctcccttccttgtgtctcctctttctgttctctaagttcctgctttattataggcaaagctcaggacattaaagaccctggcggtagagggtaggctatgggggtgaggccctgatccaagtcctgccgctaaggcactcataatttcgggctcaggggagaaatggaagtcaaagaatctcataaacacagctgcgatgacgaaccctttcacgggaaggaacatgcgagcccagaaaagtctctcctggtcttgggatggaggtcacacgaagcctccgcaaggcaaggacttttggtgagttccgggctccgctgaactcagctctttttcttttccttcctttctttccttcttcctttctttccctccttccttccttcctctttctctctttcctttctctctctcttttctctctctctctccttcttccctccctccctacctctctctcttttctttttccgtccttccttccttctttccttctttctctctcttttctttcttttcttttcttttctcttctttcattttgagacgtactctggctctgtcgcccaggctggagcgcaatggcgccatctcggcgcactgcaacctccacctcccgggttcaagcgattctactgcctcagcctcccgagtagctgggactacaggcgcgcactaccaagcccggctaatttttttttgtatttttagtagagactgggtttcacgatgttggccgggctggtctggaagtcttgacctcaagcgtgcgccctctccgccactgggtaaggcgggggcggaatagggggcttgcaatttcacactagaggcgggcaccgtgggggaaagaagagtcacgtctcccacggttcgtagaggaaggcctgcctgagcctggagcgggggcgggagagccacagtttggcatccccagggcatcccccagcccgcagactaccaggcctccagaggacaggaccccacccccggccacaggccctgcccccagcactccccgcaccccgcctccaagactcctccgcccactccgcacccaacttataaaaaccgtcctcgggcgcggcggggagaagccgagctgagcggatcctcacacgactgtgatccgattctttccagcggcttctgcaaccaagcgggtcttacccccggtcctccgcgtctccagtcctcgcacctggaaccccaacgtccccgagagtccccgaatccccgctcccaggctacctaagaggatgagcggtgctccgacggccggggcagccctgatgctctgcgccgccaccgccgtgctactgagcgctcagggcggacccgtgcagtccaagtcgccgcgctttgcgtcctgggacgagatgaatgtcctggcgcacggactcctgcagctcggccaggggctgcgcgaacacgcggagcgcacccgcagtcagctgagcgcgctggagcggcgcctgagcgcgtgcgggtccgcctgtcagggaaccgaggggtccaccgacctcccgttagcccctgagagccgggtggaccctgaggtccttcacagcctgcaggtacgtgtccccagggctggttctccgcgcccctagtggctctcctggcttggaagggtatggacaggagtggggcgtgggggcggggtgcgcaactgtggctccctgggcttccctgcgtcaagggatgggctccccccttaggaagccgaggagggaggttcgctcaaggccaggaattcaagaccacctaaagcaaaatagcgagacccccgtctcttctacacacacacacacacacacacaaaataaataaaataaaataaaataaatataaaattaaaaaacgaccgggcgcagtggctcacggagcctccacctgctgtcgagactagcctggccaacatggagaaacctcgtctctactaaaaatacaaaaaattagcctggcatggtgtgcatgcctgtaatcccagctacttgggaggctgaggcaggagaatctcttgaacccgggaggcagaggttgcagtgagccgagatcgcagcactgcactccagcctgggcaacagagtgagactcctcaaaaaaataatagcgataaaataaaaataaagccaggtgcggtgactcacgcttgtagtcccagcactttgggagggcgaggccagtggatcacctgaggtcaggagttcaagaccagcctgaccaacacagtgaaaccccgtctctactaaaaatacaaaaattagctgggtgtggtggtgggcgcctgtaatcccagctactggggaggctgaggcaggagaacctcttgaacccgggaggcggaggttgcagtgagccgggatcatgccattgcactccagcctgggcgacagagctcgactccatctcaaaataataataataataaataaaataaaatacaaatacaaaaattagccaggtgtggtggcagctacttgggaggctgagacacaagaatcacttgagtctgggaggcagaggttgcagtgagccaagattgcgccactgcactccaacctgggtgacagagcgagactctgtctgaaaaaataaaaaataagccaggcatagagctgcatgactgtagtcccagctacacaggaggctgaaaacaggaggatcgcctgaccccaggagttggaggctgcagtgagctgtgacagcaccactgcactccagcctgggcgagagaacgagaccccgtcattgggaaaaaaaagaaaaaagaaagactcccttgcctggcctcagcggatggagatttggaaggatggatgagtggatgaattaagaggttggggtaggcaagctgggtcctcaccaaggttttcacccctccccagacacaactcaaggctcagaacagcaggatccagcaactcttccacaaggtggcccagcagcagcggcacctggagaagcagcacctgcgaattcagcatctgcaaagccaggtaaccctaggatcaagggagaaaaggtccctctgatagctggaccccaggttgagagggaggtggtgagaactggacgtgtggctggggacgtggggccaggcaggacctgacaccctcctcccgtcccatcctagtttggcctcctggaccacaagcacctagaccatgaggtggccaagcctgcccgaagaaagaggctgcccgagatggcccagccagttgacccggctcacaatgtcagccgcctgcaccgtgagtgtctgcccctcgatgctctccggtggccacccctaccccgccacttgccattgctggtcctctccttgtcaggtccaccttaaggagaagatgtcctggcctggagtccctgagggctcaccagtctctgggtcaaagctgatgggagcacctccttcctcagccctgacctggcccagccaggccacccaacccttctcctctgcaagccagtgggctgtccctgaagccctgctgatcactgattggaacagaggtggagaaagaggtcttgagggacttgagctgcaggggtgctggagaaggtagaaatggggttcggggtgccatcctgaaggttagaaccttctaggggagggtgtcatggaggagggggtgccaggtagtagtgtttgtagatttgggccctccacaatgtcttggggtatgtgggaattagggctgggaacccccagctcccagaccagaaacactcttgtatcttacaaatccaatgctccaggtccctgacccctcttcctccttcctctcttgttctcctcctccctccccgcccccgccggccccctccccaccgcagaaagtgggcttttgctgccaccacaagttgtaggtgctttattcccaaatctccgttcatctcgaaccacagcatgtccacgtgtgtccgatgcagactcgcggttctctaagttcacggccccacacggtttctctgtggtcctcatccttccctgcatctgtggctgtccacagccaactgggtgaaagtttggatccccctctcacaccctagggtcagtggcaggcttccagcactgtagacctgagggttctctcctccccaagctcccgctccttcccacctccgtgctgcccgcccccaaccccgccaggctagcatctcagcgtggtcagggtcctgtccaccctcccaaagccaccatcccaggatgaggggcttctggagggtgacgggggaaggcacaagtcctggctgggaaatgcggtggaagggggcaggggttctgtgggttcgggactcccagactcttggctcaggcccgccaagtaggagaaagttcagagctgggaaggcgaacagctggcattcatggaagccacactggtggtttggccgcgtgcccatccttactggatgggaggaaagtaggggaaaggggagatgcctgaggggccggaaagcgtcttcctggtcactctgggcccgcccccacccccaccgtgcagactcatttcgacctttcccctacttttccggctgggctgggggcggttcctcccagtctggagcgtctgagcctccagacgtgctcaacgccatcctcccctcctccctccctctttctttcctcaaccctgcctcctctccctctaggagctgggaccccaggcagagcctctgagatgctcctgctcagcacagttcttcccgttctggacctgctgcctcattcattcattcattcattcatttgtcaagactgttttgtttgctttttgagacggagtctcgctctgttgtccaggctggagtgcagtggcgcaatctcagctcactgcaacctctgcctcccactgggttcaagtgattctcctgcctcagcctctcaagtagatgggattataggcgcctaccgccaccacgcccagctaatttttattcatttatcaagtcttttttttttttgagacagagtctcactctgtcacccaggttggagtgcaatggttcaacctcagctgactgcaacctctgcctcccgggttcaagtgattctcctgcctctgcctcctaaggagctgggattactggcgtccaccatcacacccagctaatctttgtatgttttactagagatggggtttggccatgttgaccaggctggtctcaaactcctgaccgatccgcccgcctcccaaagtgctggattacaggcatgaaccactgcgcccggcccattcctcaagtctttattgagcagctgctatgcgctggggcctgcgtggatgctggtgccaggctgtgggcagagctgctccttgtccccagcctcatggagcctccattgagtcagaggagagaccattagatgacctcagtgtccaggagtgggaagtccttgctcaattcccatttggggtgttctggcctggtctgggggtgaggcaaggcagggtgtccttccagaagctgggacccagagagagaagtgaggaaagagagtcccgccgggcgcagtggttcacacctgtaatcccagcactttgggaggccaaggctggcggatcacgaggtcaggagatcgagaccagtctggccaacatggtgaaacccccgtctctacaaataatgcaaaaactagtcgggcgtggtggcacatgcctgtagtcccagctgctccggaggctgcggcagaattgcttgaacctgggaggcggaggttgcagtgagccaagattgcgccactgcactccagcctggcgacagagcgagactccgtatcaaaaaacaaaacaaaaaaagagagtcccaggcagggggaacagcatgtgcaaagtccctgtggcaggacggtgtgtggtacaagggtgggaagaaagcctgtgtgccagagagggtgtgggtacagcatggcaggaggaggatgggcacgggggctggtcctccaggtgccttgtggaccatgctgaggaaggacatagggagccatggaagaggttaggcagatggcagagaggtggtcatgagataagatttgccttttacttccctggtcatccactgttaagcccccagatatgcctggctcctgagaccccccccaggggctgccctcctgtttcaagtctccactttatctcccttcagggctgcccagggattgccaggagctgttccaggttggggagaggcagagtggactatttgaaatccagcctcaggggtctccgccatttttggtgaactgcaagatgacctcaggtagggtgtgttagtccaccaggggcccctctccccataggccctgttgtctttctttaaattgaaaacaaaacaaaacaaaaaaattaaaggcagggtcttgctatgttgcccaagctggtctttttttttttttttttttttgagatggagttttgctcttggagctggagtgcaatgccacgatctcagctcactgaaacctccgcctcccgggttcaagcaattctccagcgtcagcctccccagtagctgagactacaggtgcgagcaaccacacccagctaatttttgtatttttagtagagactgggtttcaccatgttggtctggctggtctcaaactcctgacctcaaatgatttgccgactttggcctcccaaaatgctgggattataggcattagccactgctcctggcctcttttctttaaaatgcagcccttgtctgggtgtagtggctcatatctgtaatcccgacactttgggaggcctatcatgaggatcacttgagcccagaagttcgagaccagcctggacaacatagtgagagctcatctttacaaaaaattttgtaaaagtaaaaaaaaaggccaagtgcagtggctcacacctgtaatcccagcactttgggaggttgaggcagacagatcacgaggtcaggagttcgagaccagcctgaccaacatggtgaaaccccgtctctactaaaaatacaaaaattagccgggcatggtggtgtgcacctgtaatcccagctactcaggtggctgaggcaggagaatctcttgaacctgggaggcagaggttgcagtgagctgagatgacgccaccgcactccagcctgggcgacagagcgagactccgtccccccatcaaaaaaataaaaaagagaaaataaaataaaataaaataaaattcagcccttgctgggcatggtggcacatgcctgtagtcccagctactcgggaggccaaggcaggagggtcacttcagcccaggagttaaaggctgccgtgagccgtgatcacacctgtgaatagccaccgcactccaacctgggcaacacaacaaaacctcgtttctaaaaaaaaacaaaggctgagcacggtggcttacacctgaaatgccagcactttgggaggctgaggcgggcaaatcacttgaggtcagaagttcaagaccagcctggccaacatggtgaaaccctatctctaccaacataaacattagccgggcgtgcctgtgattccagctgcttgtggggctgaagcacaagaatcgcttgagccccgaaggcagaggttgcagtgagctgagattgcggcactgcgatccagcctgggcaacagagtgagactccatctctaaaaaaaaaaaaaaaaaaaaagaaagcttttttttccactgagaagtcctttccattacaagaggttacaacacggggttttacccagttcagctggcccagagaggctttgcagatttccactgcctactccctcccacactcagtccctgctgggttcttgggacaaagatcttcccaaggccagcccataatattcctccctctgacccaccctcctcgagtcctccagggatgagtgagggagctgctgtcttcctgggtttggagggggtttggtgcttggcagccagatgagggagtggggtcgtctgtgaagagggacttcctggtgaccttgtacctttctgggcagatggaggctggacagtaattcagaggcgccacgatggctcagtggacttcaaccggccctgggaagcctacaaggcggggtttggggatccccacggtaggtgtttctagtggggacagaggcaggggaggaagagggaccctcagaagtggccctgcctcatggagtggcctctcccactccaggcgagttctggctgggtctggagaaggtgcatagcatcacgggggaccgcaacagccgcctggccgtgcagctgcgggactgggatggcaacgccgagttgctgcagttctccgtgcacctgggtggcgaggacacggcctatagcctgcagctcactgcacccgtggccggccagctgggcgccaccaccgtcccacccagcggcctctccgtacccttctccacttgggaccaggatcacgacctccgcagggacaagaactgcgccaagagcctctctggtgagcaggccctgccatgccacacccagccagcagcttccctccttatctttctgctgctctgtcctgccttcaaccccacattgcatctgtttcctgcccccacctcttccttacatgccgtgtgtgtgattgggccactaacttagcctatctggcctcagttttcccatcctgaaaagggtcttgaccgtctttacttttatttacttatgtgtttgtttatttatttatttatgtatttattttttgagacggagtctcactttgtcacccaggctggagtgctttgtggcacgatcttggctcactgcaagctccacctcctgagttcacaccattctcctgcctcagcctcccgagtagctgggactataggtgcccaccaccacgcctggctaatttttttgtatttttagtagagatggggtttcaccgtgttagccaggatggtctcgatctcctgacctcgtgatctgcctgcctcagcctcccaaagtgctgggattacaggcgtgagccaccgcgcccggcctacttatttattttttgagacagagtcccgctgtgtctcccaggctggagtgcaagtgacgtgatcttggctcactgcagcctccgcctcctgggttcaagtgattctcctgcctcagcctcctgagtagctgggattacaggttcccgccaccatgcacagataattgttttgtatttttagtagagacggggtttcaccatgttggccagggtggtcttgaactcctgacctcaagtgatctgcccacctcggcctcccaaagtgttgggattacaggcgtgagccacaatacccggccacaaacatctttataatggtgctccacaggattctttttttttttttttttttgaaacagggtctcactctgttgcctaagctggagtgcagtggtgcgatctcggctcactgcaacctccacctcccgggttcaagcaattctcaaaaaaaaaaaaaaattaggcacggtggctcacacttgcaatcccagcactttgggaggctgaagcgagtggatcacttgagcccaggagaccaatctgagcaacagggcgaaatcctgtctcaattaaaaatacaaaaaactagctgggcatggtggtgcctgcctgtgttcccatctacttgggaggctgagttgggaggatctcttgagcctaggagataaggctgcagtgagctgagactgcgccactgcactcaagcctgggtgacagagtgagacccctgcctcaaaagaaaaagaaaaaatgcaggcatggtggctcacacctgtggtcccagctacttgggaggcccaggtacaagaatcacttgagcccgtaaggttgacgctgcattgagccatcaccacaccactgcactccagcctgggcaatggagccaggccctgtctcaaaaaaaattgtttttaaacttaaaaataaggccgggtgtgggggctcacacctgtaatcccagcactttgggaggccgaggtgggtggatcacctgaggtcaggagttcaaaactagcctggccaacatggtgaaaccctgtctctactaaaaatacaaaaattaggccaggcgcagtgggtcatacctgtaatcccagcactttgggaggctgaggagggtggatcacatgaggtaaggagtttgagaccaacctggccaacatggtgaaaccccctcactactaaaaatacaaaaactagccaggcgtggtggcgggtgcctgtaatcccggctactcaggaggctgaggcatgagaatcccttgaacctgggaggcagaggtgcagtgagccgagattgtgccactgcactccagcctgggagatagagtgagactcagtctcaaaaaaaaagaccaaaaattagccaggtgtggtggcaggcgcctgtaatcccagctactcgggaggctgagggaggagaatcacttaaacctgagagacggaggttgcagtgagctgagatcgcaccactgcactccagcctgggtgacagagtaagactcaatctcaaaaaaaaaaaagtcaagtccaaagcccagcctggtccccaacctgcctcatcctcaaccctatccctatctcctttcagccccatcggtggctcaaagacctgaccatgttccctctcccctgaccccggcaggaggctggtggtttggcacctgcagccattccaacctcaacggccagtacttccgctccatcccacagcagcggcagaagcttaagaagggaatcttctggaagacctggcggggccgctactacccgctgcaggccaccaccatgttgatccagcccatggcagcagaggcagcctcctagcgtcctggctgggcctggtcccaggcccacgaaagacggtgactcttggctctgcccgaggatgtggccgttccctgcctgggcaggggctccaaggaggggccatctggaaacttgtggacagagaagaagaccacgactggagaagccccctttctgagtgcaggggggctgcatgcgttgcctcctgagatcgaggctgcaggatatgctcagactctagaggcgtggaccaaggggcatggagcttcactccttgctggccagggagttggggactcagagggaccacttggggccagccagactggcctcaatggcggactcagtcacattgactgacggggaccagggcttgtgtgggtcgagagcgccctcatggtgctggtgctgttgtgtgtaggtcccctggggacacaagcaggcgccaatggtatctgggcggagctcacagagttcttggaataaaagcaacctcagaacactttgttctttgttcttgtttgttttctttcttttttttctctttctttagttcacagatctagtaagttaccctcagtttgttttaaaaagtgaacaaagtccatgtaaacatgttcccagggccaggcacggtgtctcgtgcctgtaatcccagccatttgtgaggccgagacaggcaggtcacttgaggtcagcagttcgagaccagccgggccaacatggtggaacccccatctctacaaaaaaatacaaaaattagccgagcatggtggtgcacgtctgtagtcccagctactctagaggctgacgcagaagaatcacttgagccaaggaggcagaggctgcaaataagccgagattgcgccactgcactccagcctgggcaacagagcaagactccatctcaaaacaaaaataatttttttttcgtagaggcagggtctcattctattgtccaggctggtctcaaacaccgagactcaagggatcctcctgccttggcttcacaaagtgatgggattaaaggtgtgagcgccactgcacccacccctgaaggctctaattctacatctgtgttttgttaaaaaaaaaaaaaaaagatggcgtggtcgctcatgcctgtaatcccagcactttaggaggccgaggcaggtggatcatctgacattacgagttccaggcccgcctgaccaacatggtgaaaccccgtctctactaaaaatacaaaaattagccgggtgtggtggcgggtgcctgtaatcccagctactcaggaggctgaggcaggagaatcacttgaactcgggaggtggaggttgcggtgagcagagatcatgccactgcactccagcctgggtgacagagcaagacttgatttcaaaaaaaaaaaaaaaaaaaaaaagaatagggctgggcgcattggctcacacttgtaacactagcactttgggaggccaacgagcggatcacccgaggtcgggtgatcccgctgtattgctctatatagtgagatccctatatagggtctcactctattgtccaggctggtctggcctggccaatgtggtgaaacctcatttctactaaaaatacaaaaattagctgggcatagtgatgcgcacctataatcccagctactcaggaggctgaggccggagaattgcttgaacccaggaggtggaggttgcagtgagccgagatggcgctgagaggtgacagcgtgctggcagtcctcacagccctcgctcactctctgcgactcctctgcctgggctcccactgtggcggcacttcaggagcccttcagcccaccgctgcactgtgggagcccctttctgggctggccaaggccggagctggctccctcagcttgcagggaagtgtggagggagaggcgcgagccggaatcggggctgcgcgcggtgcttgtgggccagctggagttccgggtgggcgtgggcttggcggaccctgcactcagagcagccgtccggccctgctggccccgggcaatgaggggcttagcacccgggccggacagcggctgcggagggtgtactgggtcccccagcagtgccagcgcaccggcgctgcgcttgatttctcaccaggccttagctgccttcccgcggggcagggatcgggacctgcagcccgccatgcctgagcctcccaccccctccatgggctcctgtgcggcccgcgcctccctgacgagcactgccccatgctccatggtgcccagtcccatccaccacccaagggctgaggagtgcaggcgcacggcgtgggactggcaggcagctccacctgcagccccggtgcaggatccactgggtgaagctagctgggctcctgagtctggtggggacgtggagaacctttgtctagctcagggattgtaaatacaccaatcatcaccctatgtctagctcagggtttgtgaatgcaccaatgaacactctgtatctagctactctggtggggccttggagaacctttatgtctagctcagggattgtaaatacaccaatcggcactctgtatctagctcaaggtttgtaaacacaccaatcagcaccctgtgtctagctcagggtttgtgaatgcaccaatcgacactctgtatctagctactgtggtggggccttggagaacctttgtgttgacactctgtatctagttaatctggtggggatgtggagaacctttgtgtctagctcaggaattgtaaacgcaccaatcagcgccctgtcaaaacagaccagtgggctctaccaatcagcaggatgtgggtggggccagataagagaataaaagcaggctgcccgagccagcagtggcaacccacttgggtccccttccacactgtggaagctttgttcttttgctctttgcaataaatcttgtactgctcactctttgggtccccactgcttttatgagctgtaacactcactgcgaaggtctgcagcttcactcctgagccagtgaaaccatgaacccaccagaaggaagaaacgctgaacacacctgaacatcagaagaaacaaactccagacgcgccaccttaagagctggaacacttaccgcaagggtccatggcttcattcttgaagtcagtgagaccaagaaccccccaattccggatacagtgccactgcactccagcccaggcaacagagcgagattctgtctaaaaaataaataaataaatatgaaataaaataaaaattgtaataattggataccctacatctaggacatgtatttgaggaaaaccacatctgtccattttctgaaccccagctgctgttaattttttttttttttttttccgagacaagagtctcactctgtcacccaggctggagcgcggtagtgcgatctcagcttactgcaacctccacctcccgggttcaagcgattctcctgcctcggcctcccgagtagctgagattacaggcgcctcccactgcacccagctaatttttgtatttttagtatagatgggtttggccaggctggtctcaaactcctgacctcaagtgatctgcccgcctcggcctccgaaactggtgggattacaggcgcaagccactgtgcccggcctgttaatttatttttgccccagtatctccctccaaatattccttatagatgtctcttggggaggtggtgggggttcttgcgctagaagaaaaaatatctgtgatttccttgtcttgacccttcctggcaggtgctggggacacagctgtttccctggggctgtggctgggtataggtgacaaactttttagctttgtagaggtaggtcctacagctgccaggccagggaggctagaggctgccctctccaggttccttgtttgcctgtgtcctgtactgagcaggcttagaggatctcctctgagcccactgtcactggagctggtggtgagtccagtctgcaggagagggggttcctctagccacaccctcttcatttccaggctctgccaatgatgggctcatctcttcaatgtcatcctttttcctgcagccaccttgacctcaaagcatttcctgcccctccaacctggggaacgacagaaaaaaaaaaaaaaaaaccaccacctgggcacggtggcgcactcctacactccccgcactctgggaggctgaggtgggtagatcacaaggtcaggagatcaagaccatactggctgacacggtgaaaccccgtctctactaaaaatacaaaaaattagccaggcatggtggcacatgcccgtagtcccagctattcgggaggctaaggcaggagaatcacttgaacctgggaggcggaggttgcagtgagctgagattgcaccactgcactccagcctgggtgacagagcaagactctgtctcaaaaaagaaagaaaaaaagaaagaaaagaaaaacaccatggcaggaaactaacaaggggccaggaagctgggatgtgaacctggacctgttaaactccagagctgcagctgtaaatcacatccctctcctggaccacaggagctcactggccccagttcctgcatttggaaaatggggatggttttgacaccccacccctccatgccaccatcccttcctggcctcatggtgtggggagggggtggtaaagaattaataaggcattaatattcatcacaggctgggtccagtgcctcgcgactgtaatcccagctctttgggaggctgaggctggaggaccttggagtttgagaccagcctacgcaacacagcaagacctcatctctacgataaatttttaaaaagtccgggtgcagtggctcatgcctataatcccagcactttgggaggccaaggcgggtggatcatgaggttaggagttcaagaccagcctggccaagatagtgaaaccccatctctactaaaaatacaaaaaaattagccaggtgtggtggtgggcgcctgtaatcccagctacttgagaggctaaggcagagaattgcttggactcgggaggcagagggtgcagtgagccgagatcatgccactgcactccagcctgggcaacagagtgagaccctgcctcaaaaaaaaaaaaaaagaatcaagagaaatttcagagggaggagagacagaataaggcaactgaggatgatagagggagggaggcagagaggagaagatgagacagaagtccatgtcctctgggtttgatgggagggagggaaggaaggatggagacacaagagggggagtggatatggggaaggagtcaaatttgtttatgggattgagaggtgaagccggctaggcttctgggtcgggtggggacttgaacttttctgtctagctaaaggattgtaaacgtaccaatcagcactctgtgtctagctaaaggattgtaaatgcaccaatcagcactctgtgtctagctaaaggtttgtaaatgcaccaatcagcgctctgtgtctagctaatcaggtaggggacttggagaattttctgtctagctaaaggattgtaaatgcaccaatcagcactttgtgtctagctaaagttttgtaaatgcaccaatcagcactctgtcaaaatggacaaatcagcactctaaaacggaacaatcagcactctgtaaaatggaccaatcagctctctgtaaaatagaccaatcagcaggatgtgggtggggccaaataagggaataaaaggccacccgagccagcagcagcaacccactcaggttcccttccacgctgtagaagctctgttctttcactcttcgcaataaatcttgctgctgctcactctttgggtccgcaccacctttatgagctgtaacactcaccgcaaagatctgcagcttcactcctgaagtcagcgagaccacgaacctaccagaaggaataaactccagacacatccaaacatcagaaggaacaaactccagacacaccatctttaagaactgtaacactcaccgtgagggtccacagcttcattcttgaagtcagtgagaccaagaacccaccaatactggacacattttggcgaccacgaagggactatcgcctatcaccaagcggtgagactatcgcctatcaccaagcggtgagtaccatcggacccctttcgcttgctattcgtcctatttttccttagaatttgggggctaaataccgggcacctgtcggccagttaaaagcgactagcgcaggtgctggactaaagacatgggtgtgaggctttctgggaaggggctctctaacaaaccccgactttttggagttgggagcgttagtttgcctggaaccagcttccgcttttcctgtacttctgggctgagtcgagggttgacaggaaagccattcagctctggggtcttgacaacaagttggttgatcctgtggccatgagcagaactctcaaagtcatgtcgcccaagtgagactcgcccatctatcctatctgtcctgacccttgcctcctgggtcctaatgcctgtcagacaaacttcctctcgcctctcttctccgaggctagtcccacctctaaaaaccactccctgtctctggtgcttttctagtttctcctataagaatgacttctagtataaacttcaggactctgttaccttctttaggcacctaggctcactaatcagaaagacataatttttgcccaaagccctgttgtaggggggctatctggaattttaggatccctcctcagacaagcaggactaataaaagctattcctgaagctaggatatggggagcctcagaaattgtattcttcctattcatataagtgaggacaaaaggtgtcactcttccaaccctggagatcccttccttccctcatggtatggccctccacttcatttttggggcataacatcattgtaggaaattggtaaggtcccaatactaaaaggagaatgcttaggactgtaacaggttttcgagaatgtgttggtaagggccactaaatccaatttttctcggtcatctttgtggtctaggaggacaggcaagggtgcaggttttttgagaatgcgttggtaagggccactaaatccgaccttcctcggttctccttgtggtctgggaggaaagctactgtttctgctgctgcgttggtgagtgcaactattccaatcagcagggtctagtgaccattacgggttcttgggcaggggttgtttctgctgctgcatcagtgagcgcaactattccgatcagcagggcccaaggaccattgtggattcttgggcagggggagaagaaaaacacaccaaaatcgtgggtggttttgtctttcagatgggaaacaggcatcaacaggctcacccttgaaatgcatcctaggccattgggaccagtctgacctgcaaaccctgaaaaagaggcagctcatttttttctgcactgtggcctggccccaatattctctctctgatggggaaaaatggccatctgagggaagtacaaattacaatactatcctgcagcttgaccttttctgtaagagaaaggcaaatggagtgaaatagttatgtccaagctttcctttcattaaaggagaatacacatctatgcaaaggttgcaatttacatcccacaggagaacctttcagcttacccccatatcctagcctccctacagctccccttcgtattagtgacaagcctcctctaatctcccctgcccagaaggaaataagcaaagaaatctccaaaggaccacaaaactcccctgggctgtcggttatgtccccttcaaattgtagcgggaggggaatttggcctaacatgggtacatgtctacttctccctctctgatttaaagcagatcaaggcacacctggggaagttttcagatgatcctgataggtacatagatgtcctacagggtctagggcaaatcttcaatctcacttggagagatgtcatgctattgttagatcaaaccctggcctttaatgaaaataatgcagctttagctgcagcccaagactttggaggtacctggtatcttagttaagtaaatgatagaatgacagctgaagaaagggacaaattccctactggtcagcaagccatccccagtatggatccccactgggacttcaattcagatcatggggactggagtcataaacatctgttgacctatgttctagaaggactaaggataattaggaagaagcccatgaattattcactgatgtccaccataactcagggaaaggaagaaaatccttctgccttcctcgagtggctacagaaggccttaagaaaatatactcccctgtcacccaaatcactcaagggtcaattgatcctaaaagataagtttattatccaatcagccacagatatcaggagaaagctccaaaagtgagccctgtgccctgaacaaaatctagaggcattattaaacctggcaacctcactgttctataacagggaccaagaggaacaggcccaaaaggaaaagtgagatcagagaaaggccgcagacttagtcatggccctcagacaaacaaaccttggtggttcagagaggacagaaaatggagcaggccaatcatccagtatggcttgttagcagtgtggtttgcaaggacactttaaaaaagattgtccaatgagaaacaagctgcccccttgtccatgtcccctatgccaaggcaatcactggaaggcacactgccccagaggacaaagcttctctgggacagaagcccccaaccagatgatccaacaacaggactgagggtgcctggggcaagtgtcagctcatgtcatcactctcactgagccccaggtaactttaaccattgacagccaggaaattgacttcctcctggacactggtgcggctttctcagtgttaatttcctgtcctgaacagctgtcctccaggtccgttaccatctgaggaatcctgggacagcctgtaaccaggtatttctcccacctcctcagttgtaattgggagactttgctcttttcacatgcctttcttgttatgcctgaaagtcccacacccttattagggagggatatattagccaaagctggagctattatctacatgaatatggggaacaagtttcccatttgttgtcccctacttgaggatgaaatcaagcctgaagtctgggcattggaaggacaatttggaagggcaaaaaatgcccacccagtccaaatcagggtaaaagatcccaccacatttccttatcaaaggcaatattccttaaagcctgaagcttataaaggattacaggatattgttaaacatttaaaagctcaaggcttagtaaggaaatgcagcagtccctgcaacaccccaattctaggagtacaaaaaccaaatggtcaatggagactagtgcaagatcttagactcatcgatgaggcaataatttttctatatccagttgtatccaacccctataccctgctctctcaaataccagaggaagcagaatggttcactgttctggacctcaaggatgccttcttctgtattcccctgcactctgactctcagtttctctttgcctttgaggatcccacagaccacacgtcccaacttacgtggatggtcttgccccaagggtttagggatagccctcatctgtttggtcaggcactggctcaagatctaggccacttctcaaatccaggtgctctggtccttcagtatgtggatgatttacttttggctactagttcagaagcctcatgccagcaggctactctagatctcttgaactttctagctaatcaagggtacaaggcatctaggtcgaaggcccagctttgcctacagcaggtcaaatatctaggcctaatcttagccagaggaatcagggccctcagcaaggaacaaatacagcctatactggcttatcctcaccctaagacatttaacagttgcaggggttccttgaaatcaccagcttttgctgattgtggatccccagatacagcgagatagccaggcccctctatactctaatcaaggagacccagagggcaaatactcatctagtagaatgggaaccaggggcagaaacagccttcaaaaccttaaagcaggccctagtacaagctccagctttaagccttcccacaggacaaaacatcacagagagagcagggatagctcttggagtccttactcagactcatgggataaccccacaaccagtggcatacctaagtaaggaaactgatgtagtagcaaatggctggcctcattgcttatgggtagttgcagcagtggctgtcttagtgtcagaggctatcaaaataatacaaggaaaggatctcactgtctggactactcatgatgtaaatggcaacctaggtgctaaagaaagtttatggctatcagacaatcgcctacttagataccaggcactattccttgaggggctggtgcttcaaatatgcacatgtgtggccctcaaccctgccacttttctcccagagtatgaggaaccaattgagcatgactgccaacaaattatagcccagaattatgctgcccaagaggatctcttagaagtccccttagctaatcttgaccttaacctatatactgatggaagttcatttgtggagaatgggatatgaagggcaggttatgccatagttagtgatgtaactgtacttgaaagtaagcctcttcccccagggaccagcgcccagttagcagaactagtggcacttacctgagccttagaactgggaaacggaaaaagaataaatgtgtatacatatagcaagtatgcttacctaatcctacatgcccatgccgcaatatggaaagaaagggagtttctaacctctgggggaacccccattaaataccacaaggaaaccatggagttattgcacacagtgcaaaaacccaaggaggtggcagtcttacacagccgaagccatcaaaaatgggaagaagaggggagaacagcagcataagtggctagcagaggcagggaaagaccagcagaaaggaaagagagaaagagacaggaagtcagagaaagagagaagagaggaagaaacagagagacaaagagaaggagacagagaggaagagacagagacaaagaagaagtcaaagagaaaaggagatagaagtagtaaaaaaaaaaaagtgtaccctagcgtaaatttaaaacctataattgataattgaaggtcttctctgtaaccttataacactccaataccaccttgttgtcagtgtaaacaagggcatagccggaaagcactgaggccactgacaacctgtagccttcctatcaaaaatccttaacccagcaggtttcctaacaggagatctaaatcttaattaattaccatacaaaggtctgaccagatctaggaggaactcccttcaggacaggatgatagatggttcctcccaggcgattaagggaaaaagacacaatgggtattcagtaagtgataaggaaactcttgtagatgcagagttaggaaaattgcctaataattggtctgctcaaacatgccagttgtttccactcagccaaatcttaaagtacttacagaatcaggaagcagccatctataccaattctaagttaatatggactgaacaaggtcttactaatagcaaagaataattgaaatcccaaacttacaaggttttcaacaaaagtaaagtttgctaaaaaagttaacagtgtaacatgtattatcctaacttctaatcttatggaaatcagaccgtatctgtgcccctcaaagctcaagtctatcagcgcagggccatacaactaatatccctacttatagggttaggaatggctactgctacaggaaccggaatagccagtttatccacttcattattctactaccatacaccttcaaaggatttctcagacagtttgtaagaaataacaaaatctatccttactctacaatcccaaatatactctttggcagcagcaactctccaaaaccactgaggcctagacctcctcactgctgagaaaggaggactctgcaccttcttaggggaagagtgttgtttttacactaaacagtcagggatagcacgagatgccacctggcatttacaggaaaaggcttctgaaatcagacaatgcctttcgaactctaataccaacctctggagttgggcaacatggcttctcccctaggtcctgtggcagccatcttgctcttactcacctttgggccctgcatttttaaccttcttgtcaaatttgtttcttctagaatcgaggccatcaagctacagatggtcttaaaaatggaaccccaaatgagttcaactaacaacttctactgaggacccctggaccgacccactggcccttccactggcctaaagagttcccctctggaggacactacaattgcagggccccttcttccagcaggaagtagctagagtggtcatcggccaaattcccaacagcagttggggtgttctgtttagaggggtgattgagaggtgaagccggctgggcttcttggttgagtagggacttggagaacttttctgtctagctaaaggattgcaaatgcaccaatcagcgctctgtgtctagctaaaggtttgtaaatgcaccaatcagcgctctgtgtctaactaatcgcgtaggggacttagagaactttcctgtctagctaaaggattgtaaatgcaccaatcagcactctgtgtctagctaaaggtttgtaaatgcaccaatcagcactctgtcaaaacggaccaatcagcactctgtaaaacggaccaatcagcactctgtaaagtggaccaatcagctctctgtaaaatggaccaatcagcaggatgtaggtggggccaaataagggaataaaagcaggacaccgcagccagcagcggcaacgtgcttgggtccccttccatgctgtggaaactttgttctttcactcttcccagtaaatcctgctgctgctcactctttgggtgcgcactgcctttatgagctgtaacactcaccgcaaaggtctgcagtttcactcctgaagtcagcgagaccaaaagcccaccagaagcaagaaactctagacatgtctgaatatcagaaggaacaaactctggacacaccatctttcagaaccgtaacactcaccggagggtctgtggcttcattcttggagtcagcaagaccaagaacccaccaatctggacacaggatgtgttatacaaaacttataggaggctattactttggactgacttcctacaccaggcccaacaaactaaaccaaaatggagtcactcatgctaaagttttacgtgatcaaaaagaaactaagttgtttatctgaccttctacaaaatcaggagagagagagatgggatagccaagtctcccaccaggtcagttttagccatcatgataaggatgtcctctctgctttaacctttacaagaaaagtaactttgggctgagtgcggtggtggctcatgcctgtaatcccagcactttgggaggccaaggcaggaggattgcttgagttcaggagttcaaatccagcctggccaacaaggcaagaccctgtctctggaaaaaaaaaattagctgggcatggtggcacacacctgtgatcctagctcctcaggaggctgaggtgggaagattgcttgatcccaggaagttgaggttgcagtgagctatgatcgcaccactgcactccagcctgggtgacagagcaagactcagactccaaaaggaaactttaaaatgaccaatccaagttttcttttctttttttctttttttttgagtcggagttttgctctgctctcccaggctggagtgcaatggtgtgatcttcgctcactgcaacctccgcctccctggttcaagtgattctcctgcctcaacctcctgagtagctgggattacaggcacctgccaccgcgcccggctaatatttttgtattgttagtagagatagggtttcatcatcattatcatgttggtcaagctggtctcgaactcctgacctcgggtgatctgcctgcctcggcctccaaagtgctgggattacaggcatgagccactgcacctgacctccacgttttattttctgtttgtgctttacttggccctttttctgcctgtaaaaccaacctacctgctcagctcatgggaaaattagtttcattttgtgaaatgaagtgttgcccgattgtagaattgcaaataaaatcaattaagatctttaaactaaatgtgttgtaattttgtttttttgacagatgcccaatgaacaccctgggaatgagatccaagaggcgataatggcatctgctctaataactagtacattgactctaggcttagattattcaccactgaataaataaacgtatttattcagcagtggggaacttacagcaatgatggggacagatacagtccctgatgtcatcaggctgatatgctgctgacagaggacaaaaaacaaacagatcaatgggtcaggaaagcaaggcttttttttttttgagacagggtcttgctctgttacccaagctggagtgcagtggggtgatcatggctcactgcagcctcgatttcccaggctcgaatgatcctcccgccttggcctcccaagtatctgggaccctggcatgatgcaccacatctggctaatttttgttgttgttcttttcttttttttccttttctcttttttttcctttttttctttttttttttttttttttgagagactgggttttgacatgttgcctaggctggtctctagctcctggcctcaagtgatcctcccacctcagcctcctcaaagggcatgtttttaggcataagccaccgcagccagccaaaacaaacaaacaaaaagtaacgtatactttgtgttaataattttgcatagtatattgaaaatttgccaagaaagtacattttagatactctcactacacacacagttaattatggaaggcaatggataggttaattgcttaactctcataattggccatgtgtggtgaaaatgcctgtaatcccagcactttgggaggccaaggtgggcgaatcacctgaggtcaggagttcgagatcagcctgaccaacatggagaaaccccgtctctactaaaaatacaaaaaaattagccaagcatggtggtgcatgcctgtaatcccagctattcgggaggctgaggcatgagaatcgcttgaacccgggaggcagaggctgcagtgagccgagagcacaccattgcacttcagcctgggcaacgacagcaaaactccgtctcaaaaaaaaaaaaaaaaactgtcataattattatttcactgggtacatgtgtatcaaaacacacgctgtacaccctaaatatataaaacaaacacatactgtattgtcaggtagtgataaatcctatcactacctgacaatacagcagtatgtgttttattttctatattacctatttttatattttacctatgtggcaaaatataggacaaaagaggggtagtggtaggaggtcctgttggagagcattggtatccagtaaggatttaaaagtatttatttaacaaagaatagcagaaagtggacggttgattcacacttggtgcaatctcggctcactgcaacctccacctcccaggttcaagcgattctcctgcctcaacctcctgagtagctgggtttacaggcaccagcgaccacgcccgactaatttttgtatttttagtagaaacggggtttcaccatgttggtcaggctggtctcgaactcctgacctcgtgatccgccagcctcggcctcccaaagtcctggaattacaggcgtgagccaccgcgcctggctgatctggttattttcaaaagattccatgagacgggtttcttcagtttacagaggaggaaactgaggcacagaaggataacccagtgagtcccaatatagagatggagactgcaaccgagaaaggggacccagcgctgaggtccccggaaatggtcatttatgggcttggggggcgaccagggcagcgcgcgctgacctatgacgtcatcgggacgttaagcatcgtagcattacctggacgtagccccatttctcttcccggacaggtcctctgatagtcgggtaggttctcaatcaagcctctcattagttatttggtctgtcaatccatttcattcctgcagtcttccgccccgccctcttgagctcgcccctgataggctggcgcgtccgtcacttcaaaaaggtccgcattccttccgcctttctccaggacaccgagggcgaggagggtggtaccaagcggcgcccaccctcagagcactacttccatctctgattggcttcgctgggtgcccgtcgctactccactcgccgctgataggccattcaaccgccgctctgcgcggcgccggctccgcccccgtcgggtgtttgtggtggggctgcggagtcgccgatcccgccggaagcgccaggacaatggggacccgggacgacgagtacgactacctattcaaaggtgcggccggtggggcacagacgggcgaagtcgtggcggcgaggcggcgggcagacgggccaaggccgcgctccaggccgctgggcccaggccggagcccggggcttggggcccggcgggtcaggcagccgggaaggccggagccgaccgggcagcatcagcttcgggctaggatgcgcggctatacggagccggaggcccggagagacctgggggacctaggacgcgccggggcggggccagagcctagagggggtggggcccggagcggtgggagaggctgttagggcggggcctccgcagggggtggagctttcccaagatttggcgggccgggctgggctgaaagcgtgattcgggatgggggcggggtttttaggggcggggctaaggcgtgatgggcgtgaccaataggtgggttgggcctgggcaaacggaggcggggctctcacgaggcttgtcctgattggggcagcgtgtttgggggtggggcccgggagaggcggggcaggcaatgggggctgggccgagatgagggcctgggggtgaggtgtgtggtggtgggagccttggattggggtgcaaagctgggattgagtggaaaggcacccgtgtgtgcagcaagaattccatctcttcactcagaactctcaacagtgctaagccagtacttgcacttttctgagcactttacccgaattaactaaaatcctcactgcagccctttgaggttgatactaaccagcctctctttttacacgttgggaaactgaggcccagagtgacaaagacacagtttataagtgttggaacccgattgagcccaggccacctgtaggccttaccacttaggaagcgtgtcttagggggcttgtggccagcatctgggactttgggttgttggaccaacttcttccaacacgtgcgcactgatggccggggccccagccagcctgctggagggtcttccccgcccgagggactgagggggctctaggagcatcacataaggcctaggtagatcaggcagccattgcccatttagggacagctggaggaagccggagtcccttgtttctcagctgagccttctgtgcccagctacactttggcctagtggtctgccctggttgctgggctccctggctgacaatggcagcccttgagggctaacccctggatccaaggtgccttcaccctgcggcctgctctatgagggcctgcgtcgcacatcagctgttggtatcctcacctcgctgagccgttcctccgagtgtgctctgtggcttgcaccaggcctagctgggccttgtgtctggtctcatccagcgtcttctgattgtggggaatgaggcagaggtctccccacctgggctgtccgtgtggcgaaagccttccggggggagggagaggaagtgcctctacaagggcctagagtcgtcctgtggcactgagggctctggcagctgcacacaggttgataatgtcactggtgggtgaggctctgtggtcagcaggtgcccggcccaaggtctcgcccctcgtggcaggaggaagctttggaagggttttggagactgggattctaaggggccgtctggagacagggggactaaactttgggtcctgctgatcgggtgccatctccactcagcccaccgtgaggcagctgctcccaggtcctggctgggcacccacccagacgtggcactgccagggcaggggtgttgctccccacatgccccatccaggtttctgtggttatcccctgcttgttatttttgcccttttgctgtgttaaatgacccagctccgagtgcttgctcaagtcatggttttgccctttagattatttccttgaagtgcgttcccagcagaacagttactgggtcaggagcaatggagaggctgtgtggttcccgggacttgtctgcagagactgcttcctggaaacactgatttagcttctgcggcatctggcatttggcgggcaggcggtgtggggtgggggggggcggtgcctgccctgctgccctccccacactggcctccttttactgagtctagcaggtgccctgctgaccttctcaagctagttggtagcaaaaatctaacccacaagttcagcttttcccaaactggtcatctgccgtctcaccttcacagctgtgcctcatcagaggacctcctctattctctttcaatatttttcttttcctttttcttttcttttttttttttttttttttttgagacagaattttactctagtcacccagcctggagtgcagtggcgcaatctcggctcactgcagcctccgtctcccgggttcaaacgattctcctgcctcagcctcccgagtagctgggattacaagcacccaccacacccggctaatttttgtattttagtagatacggggtttcaccatgttggccagctgatcttgaactcctgacctcaggtgatccacctgtctcggcctcccaaagtgctgggattacaggcatgagccaccgtgcctggcctctgcatttttttttttttttttggtggccacatcacgcactggctcccttgacttcagcggccaaggccagcagatcccccgggtgatgccccgtgtgccatttgttttccttcgtgaatgttctttccttcccccaggaatgacactgttgatttgtacctaattatagagcctcacatttatcctcctaacattttctcctttagccatgggccattttcatagcctgccactaattgccgtgggaccccagatttcttttctgatggactcggtactccatggttgcagctgtgtccccaagggccactgaggtcctctcagagcccttcccctaccctagaggccctggccaatcagggctcacctggccctggaggacatgggtcgtgggggaaacgggccgcagctgccccaggccctgtcctctgggtcttgtccacccctcccctgcccaaggacaaggtggcccctgtccccagggaaggggcctgcctggtgcttccctttctgtgctgaggctcctgaggcagctcccagccctcaagcctgggcagacctcacagtgggcctgctgttccagttgctgtttggggacccaaacataccatcttccccatttagaatgggggtccctccagtgccctggctctgtacacctccccatagaagagctgagacaagagtggcccccagtgccggtccctggggcctaggatgcttaggaccagcttccaggggagggatgggggcactgcttggctccgccaggctctgccggaatgggggcaccattcccctgaagagtctctcagtctgcctgagcattagggtctgggcccccagggccaccacactgtcatggggcaggccagggcacctaggacttctcagaggtgccagttctttgtttttgccaaccgggcttgcctgctctgtcagccaagtggcgtgtctggggtaggggggtcgcttcccagccagtgaagccaccaacttctgtggaaatgctcggagctgtgtcctcaagggctctttatttccccaagacaacagattgcttgtgtcctagacaatgaagttttcatccccagcctgcatcctggaccagcccgccactgccccgctggccacctctctgcatcgggcacccagtgccagggactggttgggcagctcagcctctttgccattcacctgttttgtcacccagactggagtgcagtggcttagtgtcagctcactgcaacctccgcctcctgggttcaaatgattctcctgcctcagcctcctgagtagctgggattacaggtgcctaccaccatgcccacctattttttgtatttttagtagagacggggtttcgccatgttgacaggctggtctcgaactcctgagctcaagtgatccacccgccttggcctcccaaagtgctgggattacaggcgtgagccactgcacctggcctgtcattgatctgttcagtggccatttggcctttgctctgacttggtcactctgggttgagtgtccccagctgttcagggagaatgataatatttacatctgtccctggggcagccctgagaatgtggacagctgaggcctgcaaagcactggggacccagcctggccaaagtgcttgagggcaaaactgatggggctgggtgccatggctcacgcctggaatcctagtactttggaaggccgaggtgggtgaatcacttgaagtcaggagtttgagacagcctggccaacatggcaaaaccccacctctactaaaaatacaaaaattatctgggcgtcgtggtgcacgcctataatcccggctactcgggaggctgaggcaggaggatctcttgaactcaggaggcggagagtacagtgagctgagattgtgtcagtgcactccagcctgggcgagggagattccatctcaatacaaacaaacaaaaacaaacaaactgatggggctgaggagccactaaggctgtacagctggggcaaggctggaatggtgtgaaggtgtcgggaatgcctgggcagggcccgagtttcctgtcttatttcctgaggacgtgagaactgagcagacctccctggccttggccaggctcccgtagctgccgtggaaaggaggttaaggttggtggtgtagatgggggccctcacagtgagtccatcttggcccccagtggcctgggagccgattctcatccctactggcttggttgggaggtgctgggccacacgcctacattcactccacctctttccatctttcttttttttttttttttttttgagatggagtctcgctgtgtcgcccagcttggagtgcagtggcacgatcccggctcactgcaacctccgcctcccaggttcaaatgattctcttgcctcagcctccaccaccacacccggctaatttttgtatttttcatagagacggggtttcaccatgttagtcaggttggtctcaaactcctgacctcaaatgatccgcctgcctcggcctccccaagtgctgggattacaggattacaggcatgagccactgtacccggccatctttctgtctttctctgaagtccacttggtagccctgtgcggggcacccatggtgacgtgagagaatgccagccccgttgtcttaggtctttcacgccaggccaagcagtggtctttggggagaggagaggtctgagccgaggggtcttgaaggatgagtaggagtttgctggccgccccagggggacaggctgccctatgcggtgggagctggggtgcccagagcctcaatgcccaccccataaggcagaaccacgactcccgagccacgtgctggggtttggggtaggacagtgagtgtggcagtgagttgcgaaggaagaacttggactgtggatgcagaagacctgggttcaaatcctgcctggctcacttcccaggcggtggctccagacaagtcacttggggagcaccgttgggaggtgagggcgagcccacaaacatgcatagcttcagggtcctgctctgccccgcaccccgttccccatccaagcctcagtttcctcatctgtaaaaatgggctacaggaggcttctgcgaagtaacgcacatcaagagctttgttagcacaagctcatcgaatattctccttgttcttgttattcttggcttccaagcagccaaccagagcgggtaccaggtggggttgtaggggctgcctgatcctgccctcctcacctgtggcccaagggtggtgacctggcatcctctaggtatggggcaggcggcatgcgtgggaggctctgccagcctttttggcattttgtttgttcacttgacagacattttcttgggtgtttattgtgtgccaagcactgtgccaggacctgattcctgcccttggggcagactggcaaaagataaatgccacctgacaggtgagagagtggcaagagtgacggaggaagaactgggtccgggagcagggtaattcggagagtagagttttagtagcatagcagggagggccttcttggccaagtggcatttaaggggccacacgaaggggatgagggagggagccaggtgtgtgcctggagaagagcgtttctggcagcaggagcaacccgtgcaaaggccctgaggcaggatcgcacctggcgtgttgggggaacagcatggaggcctgtgtggctggagcagagtgagccggggggggggcgggagggaggaggggagggccctgtgggcagcggggaggactgtggcttttcccctgcggaaggtgggggccacggagggttgtctgcagaggagggagggaggtgccctggctcggcactcacgggcgctctctggtggctgctgcaggaggacagcgttttggttggtgatgagcgtgaacacagggaccgcacagacaataccttccagggtctgagagtctggaatggaatcgcccagggagacatggtggggtgcacccctcgtcctcccttctcttggatctgtttcggatgtgctgaaggattgattctgagatgcgagagaaaggaaggagtcgagaatgactccaggtttctggcatgagtgcctggtaggaccaagccaaagttaaccaagataaggagggtaggtgagcggtgggtgagcaggcttagggagtgatcgggagcttggctctgctcttctgggtatgaggggcctggggcccctgaggagacatgaaggagacaatgggcacgccagtctgggcttctagggagagaggtaatataggagttaccagcccatggctggtatttacagccatgagcctggatggggtcacctggggactgggtgtggacagagatgcctgtcctgaggctccctgaggttcgaaggtagagtgggagactgagtgggagtgactgtgaggagaggagtcggggtgtggagcccctgcaggcagggaaggagggagagctggctgggtgcctgctgcacaggcccgggggagtgggggtagctgaggctgacactgactgtgggggcgaaagcgtgcttggtttgagttctaggactgggggacaggaggtggagtgagtgagtgtagatgataccttccagtgcccgaggcaggaagttgggtcaggagagaatgttttctagagggaaaattccaaacgtgtaggtacagccccacagtgtggccaggggaagggcagaggagggctgcctggtgggctccagggcctgctccctcaatgtagcaggggtcccgagtggggccagcggacctctgggtcagccagggctcagcctggctgccagcacctccccgagctcaggaggaacagccatacccatctcttcccagacaaggaagcctcatcctcagtggatgccccctaactccctgggaccagggatgaccaagccactgagccaacccaccctcaggtgccggggcccaaggcccacacttgggggtccacggggcttctggctggggcgtctggttggctgtattcaagtgcacacacacacactgatcttccccacatggtatgttctgggtctggggacagctcacccagaccccaccccagagcctggggcggctgggcccatagggacagtgcttccatggctgggacaggaaacagtttacaaggcagctcacccctggcctgaccagcaggcacctgctctgctcagggaaagtgttcctgatgctccttggccagcatgagacaggcctgctgcacaccccgtgtcgactgggctcaggcccccgtccctgggtgctgttgcccacaaaccctcatctctgttctgtccacgctgcgctgactcctttctgggccagggtttgcatcttggcaagctgctctgctgtgcacccccctcctgggacaatgcatacctgtgttggagccttgtgaggagctgtgcacacacgtggactgccacacggactgccccttgaatgaggacttagccttggctggagctccctgcagctcagcaggggacctgaccctggggacaggggtggtgggaggtggctgcaggctctttcctccgggctgcgtcctcagggcacattcctgtttcccactcagccatctgtgccgaagctggatgtgggtttgctgcaccaggagaggtgggggttgaggtgggagtagctcctcatgtcctgtcacttacatacctggagcagtgacccttcccatgccctgaccagaaaccacaacaaccgtgacagctgcctactcgtgtcccttcctgtgcgatgcctgctcttttcgtggggggagacagaatctctgttgcctaggctggagtgcagtgattcgatctcggctcactgcagcctccacctcctgggctcaagcgattctcctgcctcagcctcctgagtagctggggctacagtagccaccacgcccagctaattattattattattatttttttttttgagatggagtctcgctctgtcacccaggctggagtacggtggcgtgatctcggctcactgcaagctccgcctcccggattcacgccattctcctgcctcagcctcccaagtagctggggctacaggcgcccgctaccacacccagctaattttattgtatttttagtggagatggggtttcaccacgttagccaggatggtctcgatctcctgacctcgtgatccacccgcctcggcctcccaaagtgctgggattacaggtgtgagccaccgcgcccgggtactttttgtattttttatagagacgggatttcaccatgttggccaggctggtctcgaactcccgacctcaagtgatccgcctggctcatcctctcaaagcattgagattacaggcgggagccaccgtgcctggccatgcctgctcttacttcctcctcctgtgactgccttcctgttcacacatttggaaaaagtagtccagaggtgaagtgacttgcccaaggtcaccccgctcaggagccttctcaagccgtgtctggctgcccagccaccaggctgcaggtggaggctcagggttgatggatctcaagctgctctgcctgcctggctgcctgggtccccttgccccagctgggacagccctgctctgaggaccagacacaggcaggtgttgtgctatccgcagtggctgtttctggaaggcaggagcctgccttcacttctgcaccacttagcacagtgcctgcaggccctgggctccaggcatctctcgactcctccacaccgttggcagccgcgttggtgcagcacccagggaaccggcgggaaggttgtgggggcagtcgtgggtggagtgtggggattcacagaacctcgccttcccgcccagtggtgctcatcggggactcaggcgtgggcaagagcaacctgctgtcgcgcttcacccgcaacgagttcaacctggagagcaagagcaccatcggcgtggagttcgccacccgcagcatccaggtggacggcaagaccatcaaggcgcagatctgggacaccgctggccaggagcgctaccgcgccatcacctccgcgtgcgtgtcggcagcctgggcagggacgctgagattcgggggcgtgggcttgcagcgcgtgggcttggaaggatgtgtaggagttgggcaggagaaggggagagtgtgctcccaagaccagggagtgaggctggaagaacgctttagccatgcgccgtgggaccctcaggctgaccagcgcccagccttcgccacaccagggtatctctgggtaccaagtgcagtgaggacctagctcaggccactccgccttgccgctgcccctgcccagccagcatcccagccttcctcctccctcagcttccctcctcactggtgcccacacctggtcccacacgcctcctgtcctcccacctgggcctggcctccattccctgcaaaggcttcccagccatcaggacccactcagctgcctttttctggacccctcccaagccccccagccattcccaccaccgtcttgagatcctctgggctccctcccatctccttcatccctcaggtacatctgtctctctgtcacctcctcttgtttttttttttttgagatggagtttcactcttgtcgcccaggctggagtgcgatggcacgatctcggctcactgcaacctccgcctcctgggttcaagcgattctcctgcctcagcctcccaagtagctgggattataggcacatgccgccataccaggctaattttgtatttttagtagagatggggtttctccacattggtcaggctggtctcaaactcccgccctcaggtgatccaccctctcggcttcccaaagtgctgagattacaggtggcgtgagccaccgtgcctggctgtcgcctcctcttttttggagacagacagggtcttgctctgtcgcccaggctggagtgcagtgccacaattgcagctcactgcccccttgacctcccaggctcaagcgattctcctgcctcagcctcctgagtagctggggctacaggcctgtgccaccatgcctggctaatttaattaattaatttatttattttttagttttagtttttgagacagagtctcactctgtcgcccaggctggagtgcagtggcgcagtctcagctcactgcaagctctgcctcccaggttcacgccattctcctgcctcagcctcctgagcagctgggactacaggcgcccaccaccacgcctggctaattttttgtatttttagtagagatggggtttcaccgcattagccaggatggtctcgatctcctgacctcatgatctgcccgcctcggcctcccaaagtgctgggattacaggcgtgagcgaccctgcctggcctatttatttatttttttgagatagagtctcactctgtcatccagactgaagtgcagtgtcacaatctcggctcactgcaacctccgccccccgccccccagggttcaagcaattctcctgccttagcctcccgagtagctgggattacaggcgcctgccaccacgcctggctaatttttgtatttttagtagagatggggtttcaccatcttggccaggctgatcttgaattcctgacctcgtgatccacctgcctcggcttcccaaagtgctgggattacaggcatgagccacgacccccggccaatttttgtgtttttctagtagagatggggtatcgccatgttgcccaggctggtctgaaactcccagcctcaagtgatccacccgcctcagcctcccaaagtgctgggattacaggcatgagccaccatgcccagccccttcttccctttttttgatgacctcacggtatcttctatttccagctcccaaactccctcctcagacccccacatttcagagctggatccagggagcagcgctggggcctccagacacacacccttcccttgaggccacaatgactgccccttggctcggccctggacgacccaccctgggcgtgatgtgtgctgttatcccgtgaggctgccgctgcccatggttgtcctccagagaggctcatgggcccctgaccctgcaggtactaccgtggtgcagtgggcgccctgctggtgtacgacatcgccaagcacctgacctatgagaacgtggagcgctggctgaaggagctgcgggaccacgcagacagcaacatcgtcatcatgctggtgggcaacaagagtgacctgcgccacctgcgggctgtgcccactgacgaggcccgcgccttcgcaggtgagcagacggagacgcaggcatcagagaggtgtctggaaggcaggaggcccctcacagtgttggggccctggccacagccctggcttcccttccctgaggagtggccttgggatgggccaggtgggtgggcggggtccctgagagcatgtgggagcctgtcaccctgcctccccactcacctaggcagtattctttgttccagaaaagaacaacttgtccttcatcgagacctcagccttggattccactaacgtagaggaagcattcaagaacatcctcacaggtggccggggaccagatgggtgtgggtagggcaccagccaggcagggtggaacacggcctctgaaccttcgcttgttttgttcgtttgcttgtttttttcttttttttgtcggggcaggatggatttttgctctttgcccaggctggagtgtggtggctcgatctcagcttactgcaacctccgccttccaggttcaggcaattctcctgcctcagcctcccgagtagctgggattacaggtgcctgccaccacacccgctaatttttgtaatttttagtagagacaggatttcacaatgttgtccaggttgatctcgaactcctgggctcaagtgatcctcctgcctcagcctcccaaagtgctgggattacaggcgtgagccactgcacctggcctgtttgatttttttccaccaccacccctaacctttgctttttaaacctgccggtccacctggacacttcacagggtcagaccaggtctagcccttgctggcactggggacacagagaccccctggccccagttcctggggatgggccctgccttaactcttggcgctgcggggaggcgggtagcctcagggacctggagccttttggcttctgggagtttacctctgagggaggagggcgcttctgatcttagggagcgagaggccggggctggctgtgaccagatgtgggtcctggctgggtgcgcagcccctgtccttgttacccctgatgtgatgggggcgctgtgggggtctggagagggcctctggagtcctgcagggaggggttcccctcggcaggcagggcacgtgctggctcaccccacgtccccctgtaccccctttgcagagatctaccgcatcgtgtcacagaaacagatcgcagaccgcgctgcccacgacgagtccccggggaacaacgtggtggacatcagcgtgccgcccaccacggacggacagaagcccaacaagctgcagtgctgccagaacctgtgacccctgcgcctccacccagcgtgcgtgcacgtcctccgcccgcccccgccacggtatcctctggcccctccctgctgtccctctgtggccggctcgttccagccctcccagtgagctctgcacggccgggccggggcccaggaaggacaggagccagtgctaccccgtcctgcccggggaaaagctagaagccccggtttgctgcacccatgaaactcgggtccccacagcgtcttggcggggtggggagggcggcaggatggacggggctggccagaggcgaggaggacgggcggacggcgccgccttctccccttttccttggccgactctagggagcgattgcctccctccctccgtgaccgggtggcccagccagcccgtcgtccccacccagaaccgtgctctgggccaaagcccgaagaaccaggcagcgggggccggggcaggcggaccccccgggctctcagcgcccacccgctcctccgcacacagcagctcgcacaggcctcccacctctgcctgttgattgatgcagggagaagcccgtccccccctctcccctctcccctcccctctcctgcacgcaacgcgccctctcggccctccctgtccccctcctctgtctcgtctccccatctggtctggaacctgtttgcaagtgaagcaatatctccgtgttttgtatatacaaccgctcttgtagcctttggtttttgttaatgtagagaaacacagattctttatacactttgtaagatttacgccaaaccccagctctcgatctcttcttctccctgtggcccctgcgctgttgccccgtccccgtcaccccgcccgttactgaaatgtataatctgacttcctgtacagaaacctgccgctgcgcctctgtcttctttcttttccgccaggcgccagctcctaggctgaggcccctctcgctgcacgttccccaatgcaggccagaccccccgtctccccagcccaccccacaggaagcgagaggaccccagcacctgccaagggcagcgtggaagtcagccagcgcagttggggtgggccctggtcaagctgcccctgtggcagggagggatggaaggctgccgcttgtccttgactttaaactcctgggtcctaggacctcaggcctgcgggcgtcccctgatggggatgggagccaagagcagtggccagggttcatcactttgtctcctgccagggcctcccctcccctggggtcctgacgagggtgacttgcccagtggatgttggtgatgccagatgtctccaccctaaactgacaccggaggagggcccagtggggaaatgccagggacagcaaaatgtgtggcatggagttcctcttcccaggatccagcgtctccctccacctcacccctgcagtgaccttgggaccagtgtgagctgccagcagctgtccaaaagctccagcctctagctgaagaggccacccacaccctgaagaccctggggacccatgagagaggacagcaccactccctcttgattctagactggctgccctgcctggagggataggggatcacagacaccttttcccagaagagctccaggtcgctgggagctgtgtagacacaggagttggaatgagccaaggtgtgcgctccaggcccagggagcagcctggcacagagctaactggcagaattggaggcacctgggcaccctgggctccaaggcccattcacagagacccctgggacatggattcccctgggtttgggcagggcaggtcatgtggtggacagaggcattgggtgctaagcaagaaagcaccttgagcttttgtttgtttgtttgtttgttttgagacagagccttgctctgtcacccaggctggagtgcagtagtgtgatcttggctcactgcaacctccacctcccaggttcaagggattctcctgcctcagcctctggagtagctgggattacaggcacatgcgaccacacccagcttatttttgtatttttagtagagacagagttttgccatgttgcccaggctggtctcgaactcctgacctcagatgatctacccgcctcgacctcccaaagtgctgggattacaggcgtgagccaccgtgattggccttagcaccttgaatttcaagcagtcaaaagatcaacaaatatttctagagccgccattatctgctaggcctgagatggggactgactgacatactctatgtccctttaagagtcagaagccagcaatgccagtttaattactctgatttcagtgatttaataagcacgtcctgctcactctgccagactctgttcttaaatcttttattattatggtaacatacacataacataaaacttaactttttttggccaggcgcggtggctcacgcctgtaatcccagcactttgggaggccaaggtgggtggatcacgaggtcaggagattgagaccatcctgactaacatggtgaaaccccgtctctactaaaaatacaaaaaaaaattagccaggcatggtagcgggcgcctgtagttccagctactcgggaggctgaggcgggagaatggcgtgaacccgggaggcggagcttgcagtgagcagagattgtgccactgcactccagcctgggcgacatagcgagactccgtctcaaaaaaaaaacttttttttttttttttaagtcagggtctcgctctgtcgcccaggctggagtgcagtggcatgatctcactacaacctccaactcccaggctcaagccatcctcccaccgcagcctcccaagtagctggaaccacaggcacacgccacaacgcctggctaatttttgtattttttgtagaggcaggggtctcactgtgttgcccaggctggtctcgaactcctgggcccaagaaatccacccacctcagcctgtcaagatgttgggattacaggcttgagccaccatgcctggcccatatggcaattctacgtttacttttcttagggaccgtgttaaatctttcacacatcattatttgttatttgcaacaacccaacgaggtgggcataatatactggccccttttacagaagttaagtgattcccctaaggtctcacaattagtaagatgcagacaggtttcaaacccagaactgtgtgtaaccgctaagttatgaggcttctctgagcatttattgagtaccagctatgagccagaaaactctaagaagtggataaaatgcccagataaaaggctgggaagacagccgggcacagtggtgtgacctgtagtcccagctactctgggtctgagacaggagaatttcttttttcttttcttttttttgagatggagtctcgctctgtcgcccaggctggagtgcagtggcttgatctcggctcactgcaacctccccctcgcctcctgagtttaagcaattctcctgcttcagcctcctaagtagttgggattacaggcacatgccaccacacccggctgatttttttttgttttttttttttttggtagagatggggtttcaccgtgttagccaggatggtttctatctcctgactttgtgatccgcccaccttgggctcccaaagtcctgggattacaggcgtgagccaccgcgccagggcaacaggaggatttcaagtagaaactgccaatgaaaaaagagagagagagaaggatcacttgaacccaggagttacagtccaacctgggcaacacagcaagacccagtctctaaaaaaataataaagaaacgctgagagcatggctcacgtctgtaattacagcacttcaggagaccaaggcaggcagattgcatgagcccaggaatgcgagaccagcctgggcaacatgatgaaaccacgtttctacaaaaaatacaaaaattagccaggcatggtggcacgcacctacttaggaggaggagatgggaagatcaattgagtcagggaggtagagaatgcagtgagctgtgatcacaccactgcactccagcatgggcaacagagggagacactgtcacagtgaatgaatgaatgaatgaatgaatggagactgggaagaagtataccaactttttaaaaatgttttatggggtgggtgcagtggctcatgcctgtaaccccagcactttgggatgccgacgcaggcagatcatttgaggtcaggagttcgagaccagcctggccaacatggcaaaaccccatctctaataaaaatacaaaaattagctgggcatggtggcaggtgcctgtaatcccagctactccaggggctggagcaggaggatcacttgaacctgggaggtggaggttggagtgagcagagatagtaccactgcactccagcatgggcaactgagtgagaccctgtctcaaaaaaaaaaaaaaaaaaaaaccacctaaaggtttgattagagtcaggactggattgagcgctgcctaactagtgtcgtgtacatacattagaagacacattacattaatgtttccctcttttgtggcattagcagctgctaatgagcattaccaagcttcataatccattagcggctacaaaatggtgatatgcaaattgtattccttctcttatttctggaatactttttttttccttttttttgagatggagtctcactctgtcgccaggctggagtgcagtggtgagatctcggctcactgcaacctctgcctcccaggttcaagcgattctcctgcctcagcttccccagtagctaggactacaggttcacaccaccatgccaggctaaatttttgtatttttagtagagacggggtttcaccatgttggccaggatgatctccatctcttgacctcgtgatccgcccgcctcggcctcccaaaatgctgagattacaggcgtgagccactgcaccgcccagccaggttacttttttttcctttgagacgggtcttttttttttttttttgagtcagtctcattctgtctcggctcactgcaacctccacctcctgggtttaagtgatcctcatgcctcagcctcccaggtagctgggattacaggcatatgcccagctaatttttgtgtttttagtagagatgggatttcaccacattggccaggctggtctcgaactactggcctcatgtgataaacctgctttggcctcccaaagtgctaggattacaggtgtaagacaccgtgcccagccttcttttttttgttttcttttttgtgtatttatttatttatttatttatttgagacagaatggctctgtcacccaggctggagtgcagtggcacaatctcggctcactgcaacctctgcctcccaggttcaagcaattctcctgtctcagcctcctgagtagctgggactacaggtacacaccaccatgcccggctaatttttgtatatttattatagatggggtttcaccatattggttaggctggtcttgaactcctgacctcaagtaatccacccacctcagcctcccaaagtgctaggatcaggaatttgacaccatcctggccaacatgatgaaaccccgtctctactaaaaatgcaaattctagatgggcatggtggcaagtgactgtaatccagctactcaggaggctgaagcaggagaattgcttgaacctgggggcagaagttgcagtgagccaagatcgttccattgcactccagcctgggcgatagagtgaaactccatctcaaaaataaataaataaataaataaataataaataaataaatgaaattatctgccaggcacagtggctcacgcctgtaatcctaccactttgtgaggccgaggcaggaagatcctttgagcccaggagctcaaaactagcttgggcctcatagcaagccccgtctctattatttaaaaattaaggccaggcacagtggctcacgtctttaatcccagcactttgggaggcctaggcaggtggatcacgaggtcaggagtttgagaccagcctggccaatacggtgaaactccgtctctactaaaaatacaaaaaaactagctgggcatggtggcgtgcacctgtattcccagctacttaggaggcggaggcaggagaatcgcttgaacccaggagacagaggttgcagtaagccaagattgcaccactgcactctagcctgggcaatagagggagactccatctcaaaataaaataaaataaaaaattggctgcgcgcggtggctcaggcctataatcccagcacgttgggaggccgaggcgggcagatcacgaggtcaggagatcgagaccatcctggctaacatggtgaaaccccgtctctactaaaaaatacaaaaaaatcagccgggtggggcggcgggcgcctgtagtcccagctactcgggaggctgaggcaggagaatagcgtgaacccggcaggcggaggttgcagtgagccgagatcacgccactgcactccagctgggcgacagagcgagactccgtctctaaataaataaataaataaataaataaataaataaataaataaaatatcattcgccactaaaatgaaccagggctcttcggaaaaatggttgagtccaggcctggggcaggcaaaagacaagacaagtcagcctggaagagtttgttgagccagttagtaaggaaatgccccaagatggaattagaaaatcaccatttggggccgggcgcggcggctcacgcctgttatcccagcactttgggaggccaaggagggcggatcaccaggtcaggagatcgagaccatcctggctaacacggtgaaatcccatctctactaaaaaaaaatacaaaaaattagccgggcgtggtggcgggcgcctgtagtcccagctactcggggggctgaggcaggagaatggcgtgaaccccggaggcggagcttacagtgagccgagatcgcgccactgccctccagcctgggcgacagagcaacgctccatctcaaaaaagaaaatcaccatttggttgctattatggtaataactgactcaggcaagggtcatcaattgatattaagctcttggaaacggcgtgtgttgaggaacaggctatttaattactttcgaagtatctccccagaaagcacttattaacaaagtgtaaagtcaggtgccgtggctcatgcctgaggttaggaatttaagactagcctggccaacatggcgaaaccccatctctactaaaaatacacaaattagctggacgtggtggtgcgggcctgtaatcacaactactcaggaggctgaggcaggaaaatcacttgaaccggtggcggaggttgcagtgagcagagagggcgccactgcactccagtctgggccacagaatgagactccatcgccaaaaaagaaaaaaaaaattggtcgggcgtggtggctcctgcctgtaatcccagcactttgggaggcggaagtgggcagatcacttgaagtcaggcgtttaagaccagcctgaccaacatagtgaaacctgcctctactaaaaacacaaaaattagctgggcgtggtggtgcgggcctgtaatcccagctactcgggaggtgagccaggagaatcccttgaacctgggaggcagaggttgcagtgagctgagaccacaccattgcactccagcctgggtgacagagtgagactctgtctcaaaaaaaaaaaaaaaaaattaaaattaaataaaatattaaaaacaacaacaacaacaaaacaccacagtgtaacatactaacctcacactggagaaactggcagacaccatttgaaccaagttagcacaatcgatagtggacaaaatcagcattgtatgcatcctgaaaacacaacgtcacatctgtttcctgccacaaatgcaaaatcatgagaaagtattagacaaatagcaatggaaggacttcctgcaaaattactagcctggaatttttgaaaaatattgatgtcatggagagaaggtaagattgataaaatgttccagaaagagagactaaattagagtcgttaacaacaaaatacaatgcttgatcctgggatggatttgggattttttgttttttgacacaggatcttgctctgttgcccaggctggaatgcagtggtgaggtaatggctcactgcagcccagaactcctgggctcaattgatcctctcacttcagcctcccaagtagctgggaccacaggaggatgccaccacaactggctaatatttttattttattttgtagagatggggtctcactgtgctgcccagactgatctcagactcctagacccaagagaccttcctgccttgggctcccaaagagctgggattgcagacatgactcactgtgcctggcctggactttggatttttaaaggactttattggaaacttttcttttcttttttttgagacagagtctggctgtgttgcccaggttagagtgcagtggcaagatctccgctcactgcaacctccaccttgcagattcaagcaattctcctgcctcagcctcctgagtagctggaattacaggtgcccacaacaaaacccagctaattatttgtatttttagtacagacagggtttcaccatgttggccgggctggtctcgaactcctgacctcaaatgatccaagtgctgggattacaggcatgagtcactgcacctggcctttgaatgggctctgggaattacatgataatattagatgaacattaattttctgattttgaaggttatactgtgattatgtgcaaaagtgtgcttatactaagtgaacatatagtgcagtatttttttaaaaattgatctgtcttagagatgggggtgggtgagtttactatgttgcccagactggcctcgaactcctgggctcaagtgatcctcttgcctcagcctccagagcagctgggactacaggcctgggccaccacacttggctaacttttattttattttattttattatttatttatttatgtatttatttgagacagagtctcactctgtcacccaggctggagtgcagtggcgcgatgtcggctcactgcaagctctgcctcccgggttcacgccattcctctgcctcagcctcccgagtagctgggactacaggcgcccgccaccacgcccggctaatttttttgtatttttagtagagacggggtttcaccgtgttagccaggatggtctcgatctcctgacctcgtgatccgcccgcctcggcttcccaaagtgctaggattacaggcgtgagccaccgcgcccatccttttaaattttttgtagagacgggaactcaccatgttgcccaggctggtccccaacatctggcctcaagcgatccttccgtctcggcctcccaaagtgctccgattacaggcatgagccactgcacccggccagtctcaaaaaaaaaaaagttaaattctgcagaggttttatttattagaggacgctggccgtctgcaggtggcgcagcagcaccccctcgtgcctggggcggggctggggcggggccagtgctggggcggagccggagctgggggcggagccaagacgcggcaggggcggagccagcagctgcggcacagcggggcctgtgcggcccaagtcgtccctgtggcctccggccccgcctcttagggcgggacgtgcaaggcgattggcgaatgcaggcgagaggcggtcgctattggtccgcggcgctgtcggctcggcgggcggtgcccggacgcaggtgccggccggagcggagctagtggcgccgacgggccgggccgggccgggaccggggccgaggcgaaccgaggggcctgtgcggccgcccggcccggccgcggatcaggtaggcacgggcctgcaggtagggccggaggacgccagtccgcgggccggccccgggttcgaggccggagctcggcacccgggcgggacggctgggctcgatcccttggccacagccttctcggggacgcggggacctcagttcccgtgtcaaggccggtgggaggtctccggggtccggcacacataggcgcctctccgagcctcggtttccccacctgtgaaactgggtcatcccattgccaacctgatggggcttctgggaggattcaggaggtggctggtgcagaaaacgcctgacacacagtaggcaactgctaagtggccaatgcccttccccaacctccttctcagagcggctctgcctgcaaaatagtaagttataatataatgacccagccactttgcacaaagatgctgaaacaggatgccctgtgctatgtgggtgctcaaaacggggtagtcaaatgggcatgttgagctcattcagttcttttgaaaccatactgagtaggtggaagcagtagaaatgtcccctgttatacagttgagagagtccaggctcaaagaggttaagtgtcttgcccagggccacacagcacataaggagtagagctgggattggaaccttgcttctcatgcagggaggaatgaatgcaataacaacctccacatttaccctaaaaaatattaatagagcttttattgagcacttactgtgtgtgccagggttgactgtgtgacctctcatcaacaactctgtaagctgatgatagtaattataataagagctaatagttattaacttcttaattttttactaatttatgaactacatatcattatgactccccgtcttttttttttttagacagagtctctctctcttgcccaggctggaatgcagtggcacgatctgagctcattgcaacctctgcctcccagattcaagcgattcctacctcaccctggtcaagtagttgggattacaggcccccgccaccgtgcctggccaatttttgtctttttagcagaaacggggtttcaccatgttgaccaggctggtctcgaactcctggcctcaagtgatccaccttccttgaactcccaaagtgcacaaagtgctgggattacaggcgtgagccactgcgcccggcctgtaacactcattttagagatgataatactgaggctgagagagtaaaacagctgcctgagaccacaatgtagggagttttagggccctctgattcctctgccctctgtttcctaccttcaggaaaaggagcctgggcaggtatggaaaagactggggggcctcagtgccaccctaaacaagcctagctaagggtgagctttactggatgaattcagcctggaggctccttctcaggagacccctccacggacagagtccaccagctccatcattagaatgaggcccagagaagcaaagtgacttgaaccaggacacccagcatcggtggcatagccaggagggccaggagttaaagaacccaggtctcttgaggtccagaaccactccctggactgttttaagttcaaattctgacaccaccccttcctagctatatgaccttgggaaagtaggtgcctctctccgagcttcagcctctttccccatcatagggtgtaattattggtttgttgtgaagactcaatgagatctatctccaggccgggcgtggtggctcatgcctgtaatcccaacactttgagaggccaaggcgggcagatcactaggccaggagttcaggaccagcctgggcaacttggcaaaacaccatttctacaaaaaaatacaaaaattagctggatgtggtggtgtgcagagctactcaggaggctgaggtgggaggatcacctgaacctgggggcggtggaagcttcagtgagctgtgattactacactgccctccagccttttgggtgacagattgagaccctgcctcaaaagaaaaaaaaaaaaaaacagacaaaagaaagaaaagaaataggccaggcgcggtgactcatgcctgtaatcccagcactttgggaagccaaggcgggtggatcacctgagataaggagtttgagaccatcctggccaacatggtgaaaccccgtctctactaaaaatacaaataattagccagctgtgggtggagggcaccggtaatcccagctactctggtggttgaggcaggagaatcgcttgaacctgggaggcggaggttgcagagaaccgaggtggtgccattgctctccaccctgggcaacaagagtgaaactccatctcaaaaaaaaaaaaacaaaaaaaacaaaaaaaaaaaccagacaaaagaaagaagagaaataaatctcctgggcactgggccaagtttgctggagccatcagatcactctcccatttcagcagcctcagagctgagtccgacttgcagtcaccctctctttgtgtccagcctcaagtttggcctcttccaggcctgggcctctgtggtttgagtggacctctagcctctaaatatctctgatgcccaccacaggggctggccgaccaggatcggagggtcaagagatgtggctctctcacgctgttcttaaacggagtgaggattgagaaatgactacaacatggccaggcacagtggctcatgcctgtaatcccagcactttaggaggctgaggtgggcggatcacgaggtcaggagttcgagactggcctggccaacatggtgaaaccctgtctctactaaaaatacaaaaattagccgggtatggtggtgggtgcctgtaatcccagctactcgggaggctgacgcaggagaatcccttgaacccaggaggtggaggttgcagtgagctgagatcggccactgtactccagcctgggcgacagagcgagactctgtctcaaaaaaaaaaaaaaaaaaaaaatgactgcagcagcaaccagaaatgcagcagctctgggctagacagagggccaggtgctggggacagcgggaggcaatctgacagggtctcttttttacagaattcactgtagggtaggacaacagacgtggctaaatacgtaggtgaataagtagaatgtttcagacagggacacatgccacgagtggaatcaagtggaccccattggcacttcattgattgattgagacagggtcttgctctgtggcccaggctggagtgcagttgtgtgatcatggctcactgcagcctcaacctgggtgcaagcgattctcccacctcagcctcctgagtagctgggattacaggcgcacatcaccacacccggctcatttttgtattttttgtagagacggggtcttggtatgttgcccaggcttctctcaaactcctgggctcaagcgatcctcccacctcagcccccaaagtgttgggattacaggcatgagccaatgcgccaggccccagacagcattgtcgagaaggcttctccaggaaggtgacctttgaaggagacacttataacaactgtttcgagttcagtgagatgatgactatgtatggagattgcttggcatagtgtctggttcttaatagatagaagctgctagtataattttggtggtttgcaggccttgcattaagagatttacctgtggttttttttttttctccctgatagaagaaatattagaacaccacatgcaggagctgggatagttcctgtaatatccagttatttgcagaaatgtaaagaccaggccaggggtggtggctcaagcctgtaatcccagcactttgggaggccgaggcgggcagatcacttgagatcagcagttggagaccagcctggccaacgtggtgaaaccctgtctctactaaaaatacaaaaacgagctgggtgtggtgaaacacagctgtagtcccagctactcgacaggctgaagcaggagaattgcttgaacccaggagcctgaggttgcagtaagctgagatcacaccactgcatttcagcctgggtaacagagtgagaccctgtctttttttttgggcggggggatgaagtcttgctgtcacccaggctggagtgcagtggcgtgatctcagctcactgcaaactccatctctcaggtttaagcgattctcctgcctcagcttcccaagtagctgggattacagttgcccgccaccatgcccaagtaatttttgtgcttctagtagagatggggttttgccatgttggccaggctggtctcgaactcctgacttcaggtgatccgcccgcctcggcctcccaaagtgctgggattacaggcatgagccactacgcccggccaataccctgtctttttttttttttttttttttttttttttttgagaaagaatttcactcttgttgcccaggctggagtgcaatggtgcgatctcggctcactgcaacctctgcctcccaggttcaagtgattctcctgtctcagcctcccgagtagctgggattacaggcatgcgccaacatgcctggctaatttttttgtatttttagtagacacggggtttctccatgtggtcaggctcgtcttgaactcctgacctcaggtgatctgcccacctcggcctcccaaagtgctgggattacatgcatgagtcaccacgcccggccaagaccctgtcttaaaaaaaaagaaatgtaaagacctagcctcagaagggctgggctggaggaaaggactcgcctctgcctgccttcccgtaaagagcccagccgcttcccctttggcctctgagcttaaggttctggttgcagggacttgggagggagagcagcaggcaccctgtgtcaggcccggccactgccctgtgggtgttatctcaggcctgcagtcttcctcttgggtccctgcctttgggcaatacttgcttatctggcctgcagaggcctgactatgatgctcagaagaacatgtgaggccaggaaggctgctggctgagctgtttagagggcatttatccagcagtgaaccgtcctagcgcaagagttagtaattgctcccctgttccttcacctccccactttggagctcagatttgtttttttgtttgtttgtttgcttgctttcttttgttctgttttagagactggagactgggtcttgctctgttacccaggctggagtgcagtggtgtgatcatagctcactacagccttgaactcctgggctcaagaggttgaggctccctcctcagcctcccaagtagctgggactacaggctttcagcaccatgcctggctaattcaaaaaaaccttcagagagatagggtctctctatgttgccctagctcgtctcaaactcctggcctcaagtgatcctcctgcttggacctcccaaagcgctgggattacaggtatgaacaacttcccctggcccagggctcggattttgattggcagtttacaagctgacttggggtgggggtgggaatacttcgctgagtacttgattgcctctcttgcttggactttctgaacactttaggggctgcaggggctctggacattgtagctcttgggggttggacaagctgggaacagagatccttggctccagggcacctgtattggcttcaaggaggtctccagaaagggcccttgtttcttcaatgaaattctctgccgggccgggtgcagtggctcacacctgtaatcccagcactttgggagtccgaggcagatggatcacctgaggtcaggagtttgagaccatcctggccaacatggtgaaaccccatctctactaaaaatacaaaaattagccgggcgtggtggctcatgcctgtaatcccagcactctgggaggccaaggcaggaggatcacaaggtcaagagatcaaaactatcctggccaaaatggtgaaaccccatctctactaaaaatacaaaaattagctgggcatggtggcgcatgcctgtagtctcagctactcagcaggctgaggtaggagaatcatttgagcccgggaggcggaggttgcagtgagccaagatcgcgccattgcactccagcctgggcaacagagccggactccatctcaaaaaataaataaataaaatacaataaaaataaaaataattggccgggcgcggtggctcacacctgtaatcccagcactttgggaggccgaggcgggcggatcacgaggtcaggagatcgagaccatcctagctaacacggtgaaaccccgtctctactaaaaatagaaaaaattagccgggcgtggtggcgggcgcctgtagacccagctactcgggaggctgaggcaggagaatggcgtgaacccgggaggcagagcttgcagtgagctgagatcaggccactgcactccagcctgggcgaaagagcaagactccgtctcaaaaaaaaaataaataaataaataaataaaaataaaaaataaaaataaaaataaaaataattgccgggcgcagtggctcacacctgtaatcctagcactttgggaggctgaggcaggtggatcacaaggtcaggagatggagatcatcctggctaacatggtgaaaccccgtctgtactaaaaattcaaaaaattagccgggtgtgttggcgggcgcctgtagtcccagctactcaggaggctgaggtaggagaatggtgtgaacccaggaggtggagcttgcagtgagctgagatcgcgccactgcactccagcctgggcgacagagtgagactccgtctcaaaaaataaataaataaataaataaataaataaataaataattagctgagtgtggtggtgggcccctgtaatcccagctacttgggaggctgaggcaggagaatcgcttgaacccgtaaggtggaggttgcagtgagccgagatcatgccattgcactccagcctgggcgacaagagtgaaactccatcttaaaaaaaaaataaataaatataaataaaaatacaaaaactagccaggcatggtggtgcatgcctgtagtcccagctacttggggggctgaggcaggagaatcgcttgaacccaggaggtggaggttgcagtgagctgagatcgtgccactgcgctccagcctgggcaacacagcgaaactctgtctcaaaaaaaaaaaaaaaaaaaagaactggttctgataccttatctggaaaggtgatattagttgaaaggtggtcctggccctggaggctttgagggtaagaggaggcctagcttttcttgtcttctcttttttagagacaggttctcactctgtggcataggcaggagtgctgtgggcaccgtcatagctcactgcagcctcaaactcctgggctcaagtcatcctcccacctcagcctcacaagtggctgggactataggcttgtgctaccatgcctggctaatatttttggttttctttagtagagccagggtttcaccatgttgcccaggctggtctcaaactcctgagctgaggcaatcggaggcaggcggattgtcttgaatccaaagtgctgggattacaggtgtgagccactgctcctggcctaattttctcattttttataaagatagagtcttgatgtgttgcctaggctggtctcaaactcctggggctcaaacaatcctcctaccttggctttcaaagcaccgggactatagacatgagccaccacacctggccaggcctagctttcctgttttttttgggtttttttttttttttgagacagagtcttgctctgtcgcccaggctggagtgcagtggcgtgatctcggctcactgtaacttccccctcctgggttcaagcgattgtcccgcctcagcctcccaagtagctgggactacaggcgcgtgccaccaagcctggctaattttttgtatttttagtagagatggggtttcactgtgttagccagaatgggaaacctagcttttcttttttttttacttttttctttcttttcttttttttttttttttttgtatttttagtagagacagtgtttcaccatgttggccaggatggtcttgatctcttgacctcgtgatccacccgcctcagcctcccaaagtgctgggattacaggcgtcagccaccgcgcctggccagggaagcatagcttttcttaggagagtgagaaataatacaacccaagctcctgctgtataccagccttgtgctgagttacatgcatcgtctccttgaatcctcactggccctacagaggcccattttacagatggtgcaaactgaggctcagagatgtaaatggtctagtggtccctacagccttgacaagaggggactcaaaccttagtccgtcaggctcattaaccttgcccctaacctccgcactggcctgttcccaggctcctggaaccatgggcctcaggccctgaggatacggggctcccggtggccatgacgacgggtgactgctgccacctccccggctccctgtgtgactgctccggcagccctgccttctccaaggtcgtggaggctacgggcctcggaccgccccagtatgtggcacaggtgacttcaagggatggccggctcctctccaccgtcatccgtgccttggacacaccgaggtgagtggtgactgcgtggatatcctggcctttgttgcctcttctctctgggcgcagtgagtttctcccagcctggggttagaagtccaaccgttgacagagggccaagtgggtaaatagagaaagagacacaaacagttatcgccttgtggaaacagaggcctagctttggccgggtctgattctttaggaaaagctgaaattccagattattatgtgaaatctgaaggtcaaatgttgtcaagtaacacacttttgggaggcagtatagggggcggtcaggagtgcaggctgtgggctcagtgcctcggccctgaccctgagtggacacctctctctctcccagagtgacctgggacaaattacttcaccactgtatctctcttttttttttgaaacagagtctcattttgttgcccaggctggagtgcagtggcgcagtctcagctcactgaaacctccgcctcccaggttcaagtgattttcctgccttagccacccgagtagctgggattacaggcacccgtcaccacacctggctagtttttgtacttctagcagagacggggtttcgccatgttggccaggctggtctcaaactcctgacctcaggtgatctgcccgtctcggcctcccaaactgctgggattataagtgtgagccaccgtgcccagcctctttttaaatttttttttttttttttttttttagagagtcttgctttgtcactcaggctggagtacagtggcgtgatctcggctcactgcaacctccgcctcccggattcaagcgattctcctgcctcagcctcctgagtacctggttctacaggcacgcgccaccacacccagctaatttttgtatttttggtagagatggggtttcaccatgttggccaggctgatcttgatctcttgacctcataatccacctacctcagcctcccaaagtgctgggattacaggcgtgagccaccgcgcctggccgtgctcaacaaatattaaggctttttttttcctctcttctctgaatttgtttttttgttttgttttgttgttttggagacagagtctcactttgtcacccatgctggagtgcagtggcatgatctcagctcactgcaacctctgcctcctgggttcaagcgattctcctgcctcagcctcccaagtagctaggattacagcccccccgccccgaccatgcccgactaatttttgtatttttttagtagagacggggtttcaccatgttagtcaggctggtctcctgacctcagatgacccacccacctcggcctcccaaagtgttgggattacaggcatgaaccactgtgcctggcctcttctctgaatttgctctcccaaactttttcacagtttcccagaacaagctccaaactgacatgattcttcctcaagattctcgtcacttctgtttccctgggttggtttccggacaaagggttccttttttgttaactttgtttgtgtgtgtacttgggggagggtgggatcggggtatgggttcagaaaggaggcaggcaggcatgcccttttgccattgcaggaggaaatagcagtccagggacaggactgttgagaaagcagccatgagcagcctgttgggctctttttaaagccgcccaactccaccccgcagcatgagaatctgagaaaaggatagaaaacagtcatttccaggcaggcgtggtcgctcatgcctgtagtcccagcactttggaagtccaaggctgaaggatcgcttgagcccagaagctcaagaccagcctggtcaacatagtgagacccccctctctagaaaaagttaaaaaatattagctgtgtggcgtggtgccacctgtagtcccagctactcgggagactgaggcaggaggatcgctcgagctagggagtccgaggctgcagtgagctgtgattgcaccactgcactccagcctgggtgactcaaaaaaaaaaaaaaaaaagaaagaaaaaaaaatacagtctctctgagaggaaattggcgttgtctggaaaatagctcttctttgtgtgacctcacagtctgccttctggccagaaatgtttgggaaacagtgactcatggctgtttggcctctgggccacgccccctgcctcctgagctgccctgggaaggacccggcatccccagagactgggccagggctggagacttttccgaggcagctttctgcagatgctttttatttctatttccccctcacaagggcagaggagcaggtgagcacttctctctggatgcacaggtttctcaggtagcacgggcttcaggtgtgattagatccaggggcccgcaaagatgtccttaagaatctacctttcccaggccttgcgcagtggctcacgcctgtaatcccagcactttgggaggccgaggcgggtggatcacgaggtcaggagatcgagaccatcctggctaacacggtgaaaccccgtctctacaaaaaatacaaaaaattagccgggcgtggtggccggcgcctgtagtcctagctactctggaggctgaggcaggagaatggcatgaacctgggaggtcgagcttgcagtgagccgagatcgcgccactgcactccagcctgggtgacagagcaacactgtctcaaaaaaaagaaaaaaaaaaatctacctttccctgtctcttggctctgctctcctctgtgctggcatcattcacaggctccacacagactaggcagctgcaggagctccaggcttctgtcagccttgtggccgacagttctggagtttacggggaaacaaagaattttaggaatagattatcggtgactctgatggtatcatacaagcctgagttggttgcatgagcaggggtgcgtgctgttctattttctttttctttttttcaaatggtctcactctgttgtccaagctggagtatagtggtacaattatgggtcattggagctttgaactcctgggcacatgtgatcctcctgcctcagcctcccaagtagctgggaccacaacatgtaccaccacgccaagataagtctttaaaaaaaattttgggaccgggcgtggtggctcacgcctgtaatcccagcactttgggaggctgaggcgggcagatcacgaggtcaggagattgagaccatcctggctaacacggtgaaaccccgtctctactaaaatacagaaaaaaaaaaaattagctgggcatggtggcatgtgcctgtagtctcagctactcgggaggctgaggctactcgggaggctgaggcaggataatcgcttgaacctgggaggtggaggttgcagtgagctgatatcacaccactgcactccagcctgatgacagagcgagactccatctcaaaaaaaaaaaaagaaaattttttttttatagagatgagatctcactaggttgcccacactggccttgaactcctcggctcaagtgatcctcccgcttcagccttccaaagtgctagaattacaagcatgagctactgctcccggcctggtgttctgactggtccagtatgaggcctgaggtcatgaggagtgttgtctgctctgccctagtccttgaggatttttttttttttttgagacggagcctcactctgtcacccaggctggagtgcagtggtgtaatctcggctcactgtaacctctgccttccaggctgaagtgatactcctgcctcagcctccccagtagctgggattacaggcacctaccaccacgcccagctaatttttgtatttttagtagagacggggtttcaccatgttggccaggctggtcttgaaatcctgacctcatgatcctcctgccttggcctcccaaagtactgggattacaggaatgagccacctcacccagctggtctttgaggattaagagtcgaggattgggggccgggtgcggtggctcacgcctgtaatcccagcactttgggagcctgaggcaggcggatcacaatatcaggagatcgagaccatcctggctaacacggtgaaaccccgtctctactaaaaatacaaaaacacaattagccgggcgtggtggcaggtgcctgtagttccagctactcgggaggctgaggtgggagaatggcgtgaacccgggaggcggagcttgcagtgagccgagatcgcaccactgcactccagcctgggtgacagagcgagactctgtctcaaaaaaaaaaaaaaaaaaaaaaagagttgagggtggggaagttgtgcaggacaatcagggtgggtattttagggaaatttggagaggacatgggggcgggtataacagatgcccatcttgggtctgagagggtgctgcagggtccctgggaagggaacacatcactccacctgtgggagtctgggaaggcttcgcaaggttaccttccctgcatctccttcccaaagggaaggacatttagagctgggcattgaaggatgagtaggagttcactaagtggcagcatggggtaagggtgagcttgtgatccagtgggtagtgaagcaggtatagacagaaagcccaatcattgctcatgggtcctatctctgtgtccagtgatggtcctttctgccggatctgccatgagggagcgaacggggagtgcttgctgtccccgtgtggctgcaccggcacgctgggtgccgtgcataagagctgtctggagaagtggctttcctcatctaacaccagctactgcgagctgtgccacacggagtttgcagtggagaaacggcctcgacccctcacagaggtacccttaagagtctgagactgcggtgggcagtggggagagggcagacatgggggccaaaggcaggagctgccccgggcaatctggtggtcctcctagggcagaactccctaccgcccctgtccaccaggtgggtctgctgatggtgtgtcagaaaccaggcctagggtttaagagctcccagacccattaacctctccctgttttcattcagtctttcttcttcttctttcttcttcttccttctccttcttcttttttttgagacagagtctaactcttgtccaggctggagtgcagtggtgcgatctcggctcactgcaacttctgcctcccaggttcaagcgattcttctgcttcagcctcccaagtagctgggatgacaggcgtgcgccaccatgcccagctaattttctgtatttttagtagagatgcggtttcaccatgttggccaggctggtctcgaactcctgacctcaagtgatctgcccacctcagcctcccaaagtgctgggattacaggcatgagccaccgctcccagcctgtgtctttcattagcagagatttcctgggcacctccagcatgcccagcactctgttaggcactggggacccagccaccaacaagacacgtagggctgggcactcatggagattaaagtccagtaactttaatctggacttcaaagcatcgcttctgatatgaggttacagaaaaaaaaaaaaaaaatcaacgaagcaactggtttctgggagcaatagtgcagtaagggaaaaacatgtcacagggggtggggcaacttggggtgtcaggcaaggcctcaaaaggaggtgaaccccccagctgaggcctgagagatgaaaaggaacaagctgccgggcgcggtggctcatgcctgtaatcccagcacttcgggaggccgaggcgggcagatcacttgaggtcaggagttcgagaccagcctggccaacatggtgaaaccccgtctctactaaaaatacaaaaaatacaaaaaaaaaaaaaaaaagtccagacacggtggctcacgcctgtaatcctagcactttgggaggccaagatgcatggatcacctgaggtcaggagttaaagaccagcctggccaacatgggaaaaccctgtctctactagctatacaaaattagccaggtgtgggctgggcacggtggctcatgcctgtaatcccagcacttggggaggccgaggcgggcggatcacgaggtcaggagatcaagaccttcctggctaacatggtgaaaccccatctctactaaaaatacaaaaaattagccgggcgtggttgcaggtgcctatagtcccagctactcgggaggctgaggcaggagaatggcctgaatccaggaggcggagcttgcagtgagctgagatcaggccactgcactccagcctgggcgacagagtgagactccatctcaaaaaaaaaaattagccaggtatggtggtgggtgcctataatcccatccactagggaggctgaggcaggagactggcttgaaccctagggaggctgaggcaggagaattgcttgaaccctagggaggctgaggcaggagaattgcttgaacccgggaggcggaggttgcagtgagctgagactaagccactgcactccagcctgggtgacaaagcaaaactctgtctcaaacgatgaggaaaaagctaggtgtggtggcgcatgcctgtaatcccagctacttgggaggctgaggcaggagaatcacttaaagctgggaggcggagtttgcagtgagttgagatagcgccactgcactccagcctgggcaacagattgagactctatctcaaaaaaaaaaaaaaaaaaaaaaaaaaaaaaaaaaccaaggctggacgtggtggctcacaatcccagcactttgggaggcagaggtgggtggatcacctgagttcaggagttcgagaccagcctggccaatgtggtaaaacaccgtctctactaaaaatacaaaaattagctgggcatggtggcgggggcctgtaatcccagcttgaacccggaaggcggaggttgcagtgagccaagattgcaccacagcactccagcctgggcaacaagagcgaaactccgtctcaaaaaacaaaaaacaaaaaccctagaaaagcccctggcccacctaggagccagagtgtagggagaaaagtgggagggaggtccagccccttcacacaccctcccacacccactttggtctccgtgctacagccacacagccccctccccacacatcttgtctaggccgcctccccctatcccagggcctttgcatctgccgcccctgcagcctagagccccatctcccccattcttcacgtggttccttctgttcattccgttctcttcaatgtcacctccttggcaaggccttgccccatgtgaccgttcacccatttcatacctccactgccagcatgggagggcaggggccctttctgtctcatccaccagaatttcatgaattaagcccatttcttggctgggtgtggtagctcatgcctgtaatcccagcactttgggaagccaaggtgggaagatcacttgaggccaggagttcaagaccagcctgggcaacacagcaagaccctgtctctacaaaaaaatcaaagaaatgaaagaacttattattattattattattattattattattattattattttgagacagagtcttactctgtcacccaggctggagtgcagtggcacgatcttggcttactgcaacctccacctcctgggttcaagcaattctcctgcctcagcctcctgagtagctgggattataggtgcgtgctaccacgcccagctaattttgtatttttagtagaggcagggtttctccatgttagccaggctggtcttgacctcctggcctcaagtgatccacccactttggcctgccaaagtgctaggattacagacgtgaaccaccacaccagggctttttttttttttttttttttttagcccatttcttttggcctgtcatctggggaaggccaagcgtagtagattagtagccaaagacgcttcggccctggagcaagacttcccaggttggaaccccagctttgtggactatgtagctgtgtgagtttgctcacttgagttaattcctctgtgcctcagtttccccatctgtaaaatgggggtaaatgtgcccagcacctggcagggcctggctcctcatgggctcaataaatgtttgaaagaaggaaagggccaggcgtggtggctcacacctgtaatcccagaactttggaaggccgaggtgggcagatcacttaaggtcacaagttcgagaccagcctgacaaacatggtgaaaccccatctctactaaaaatacaaaattagcagggcatggtggcgcttgcctataatcccagctactcgggaggctgaggtgggagaatcgcttgaacctgggatgttgaggttgcagtgagccgagatcgtgccacggcactccagcctggctgacagagcgagactctgtctcaaaaaatatatatacatacaaaattagccgtgcatggtggcgcttgcctgtaatcccagctactccggtggctgagacaggagaattgcttaaacccagaaggtcgaggttgcagtgagccgagatcacaccattgcactccatcctgggcaacagagtgagaatctgtctcaaaaaaaaaaaaaagaaagaaggaaaggacagagggaggcctaggcctggaggtccttacccctccccctcagtagccccttctctgccccctctcctctgccccctatcctctcccctgcagtggctgaaggacccggggccgcggacggagaagcggacactgtgctgcgacatggtgtgtttcctgttcatcacaccgctggccgccatctcaggctggttgtgcctgcgcggggcccaggaccacctccggctccacagccagctggaggccgtgggtctcattgccctcaccatcgccctcttcaccatctatgtcctctggacgctggtgagtggctgtggttgtgcagcacgcgtctcgagctctgccgctgggagcagcagggccaaggatttggcccctggcttgtggggcacggggctccctggctgcctctgtctatggccgtgggtggaagagagcttctgaggtcaccctgcctctccaggagcttgagattccaaatgtgacaaaggtctagggaatccctgagccaggtgtgaaccttgacctgagtgcaggaacccccatccatgaacccccaagattaggagtggggcagagaggagcaaaagcctgagagagagatcgggggagaacaagatagtggggaaatatatattgattaagaaattgaggctgggcatggtggctcacgcctgtaatcccagcactttgggaggccaaggtgggtggatcacctgaggtagggagttcaagaccagcctaaccagcatgaagaaaccccatctctactaaaaatacaaattaaccaggtgtggtggcacatgcttctaatcccagctacttgggaggctgaggcaggagaattgcttgaactcgggaggcggaggttgcagtaagcctagatcatgccattgcactctagcctgtgtaaaaagagcgaaactcgatctcaaaaaaaaaaaaaaaaaaaaaaggaaaaaagaaaaaagaaagaaattgaaagggaaaacccaggcacagtggcttactcctttaatcccagcactttgggaggccaaggcaggtggatcatctgagcccaggagttcaagaccagcctggccaacatggtgaaaccttgtctctactaaaaatacaaaaatttagctgtgcgtggtggtgggtgcctgtaatcccagctactcgggaggctgaggcaggagaatcacgtgaacccgggaggcagaggttgcagagagccgatattgcgccactgcactccagcctgggcgacaagagcaaaactctgtctcaataaaaataaaaacaaaaataaattgaaagaggaaagccaggtgcggtggctcatgcctgtaatccccatactttgggaggctgaggcaggcggattccttgaggtcaggagtttgagaccagcctggccaacatggtgaaaccccatctctactaaaaatacaaaaaattaacctggtgtggtggcatgtgcctgtcatcccagctactagggaagttgaggcaggagcatcgcttaaacccagaagccagaggttgcaatgagctgagatcctgctactgtactccagcctgggcgacagagtgagattctgtctttaaaaaaagaaaaagaaagaaagaaaagaaaagaaaaattgaaggggaagagagagaggaactgagatgaaaacactgagtgaggccaggcccagtggttgtaacatctgcagtcctagcacactgggaggctgaggcaggaagattgcttgaagcaagaaggttcaagaccaggacggggcaacaaagccagatgcccatctctataaaaaatttaaaaattagtggtggtgtgcacttacactctcagctactctggaggccaaggtgggaagatctcttgaggttaggagttttagactagcagggcaacttagggagaccccatctctacaaaaggaaaataattagctgggcatgttggctcacacctgtaatcccaatattttaggaggccgaggtgggaaaatcccttgaggccaggagttcaagaccagcctgggcaacatagaaagaccccgtggctacaaaaaattttaaaaaattagctgggcatggtggcacatgcctgtagtcccagctacctgggaggctgagtcaggaggatcacttgagcccaagaatttgaggctgcagtgagctgtgatcacactactatactccaccctgggtgacaaagcaagacccagtatcaaaaaaagataaaaagcctgggtgcagtgcttctgcctgtaatcccagtattttgggaggctgcagcaggaggatcaccatagcccatgagttcaagatcagcctgggcaagatggtgagaccccatctcaaaaaataataataggggctgggcatggtgactcacgcctgtaatcccagcactttaggaggttgaggcaggcagattgcttgagcttacgagtttgagaccagcctgggcaaagtggcaaaaccccatctctagaaaaaatacaaaagtttgtcggccgtggtggtgcgtgcctgcagtctcagctactccggagggtgaggtggaggatcgcttgagcactggaggcagaggttgcagtgagccgagattgcaccactgaacttcagcctgggtgatagagcctgaccttgtctcgaagaaaataataatattaataaaagaaaaaggaaaaaaaaaaggctgggtgcagtggctcatgcctgtaatcccagcactttgggaggctgaggggggcatatcacttgaggtcaggagttcaagaccagcctgagaaacatggtgaaaccccgtttctactaaaaatacaaaaaattggccaggcacggtggctcacgcctgtaattccagcactttgggaggctgaggcgggtggatcacgaggtcaggagttcaagaccagcctgactaacatggtgaaaccgtgtctctactaaaaatacaaaattagctgtgtgtggtggcacatgcctgtaatcccagctactcaagaggctgaggcaggagaatcgattgaacctgggaggcagatgttgcagtgagctgagattgcaccattgcactccaacctgggcaacagagcaagactccgtctcaaaaaaaaaaaaaaaaaagaaaagaaaagaaaagaaaaattagccaggtgtggtggcacatgccagtaatcctagctactcgggaggctgaggcacaagaatcacttgaatttgggaggtggaagttacagtgagccaagatcgtgccactgcactccagcctgggtgcctgagtgacagaataagactctgtctcaaaaaaaaaaaaaagaaaaaaagcctgaatgagagacagacagaatgatgggggtgtgaggtattgttctaggcctctggtaggcagcagaacccttgcttagaggcaaaagctcccccaaatctcacccctcagacataaccactattgtccagctgtaggggagtccctgcctcacaaagtatttttcaatgaacctaccagcatttctttttttttttttttttttttgagacggggtcttgctctgtcacccaggctagagtgcagtggcacaatgttggctcactgccatctccgcctcctgggctcaagcgattctcctgtctcagcctcctgagtagctgggattacaggcatgtgccaccacacccagccaatttttatatttttagtagagacggggtttcgccatgttggccaggctggtctcgaactcttgacctcaggtatccacccaccttggccttccaaagtgctgagattacaggcatgaaccatcgcgccctgcccctaccagcatattttaaaatatgtaaataggatgaaatcatagctactgttttagcatctgcttgttttcattttgctggtgttctttaaaaaaaaaaacccacacacacaacgaggcagccacccagcagacattcattgtatgggtggaccatatttatttaacaaatcacttttgacaggcactgggattttttccaatgtgtgtgtggttttatttctacttccttgttttttccattatgaacagtgctttgggactgtccatgcaaatgtttcttgggaacttgcttggtcaaaggatgtgaaccactgacctttatttatttatttatttatttagccggagtctcactgtgtcgcccaggccagagtgcaatggtgcaatctcagtttactgcaacttccgcctcccgggttcaagcagtcctcatgcctcagcctcccgagtagctgggattaaggcatctgccaccatgtctggctaatttttgtatttttagtagagacgagttttcaccatgttggccaggctggtctcgaactcctggactcaggtgatctgcccaccttggccttccaaaatgctgggattataggcgtgagccattgcgctaagcaacatttattttttaatttttttttttttttttgagacagagtctcgctctgtcaccaggctagagtgtagtgacgcgatcttggctcactgcaacttctgcctctcaggttcaagcaattatcctgcctcagcctcccgagtagctgggactacaggtgtgcgccaccatgcccagataattttttttatttttagtagagacagggtttcaccatgttggccaggatggtctcgatttcttgacctcgtgatccgcccgtgtctgcctcccaaagtgctgggattacaggtgtgagccaccacactaggccatttttaaatttttttatagactaatttttagagcaattttaggttcacagcaaaatttagcagaaagtacagagagttcctgtatatcaccctgctccatacgcacacaacttgcacagcctcccccactattaacatcgtttacccaagcagtgcatttgttacaatcagtgaaccttcattatccctttaaagccatagttcacattaggattcacttcttttgtttgtttgttttgagatggtatctcgccctgtctctcagactggagtgcagtggtgtgatctccgctcactgcaacctctacctcctgggctcaagcgatcctcccacctcggccctcccaagtaactaggaccataggtgcccactaccacacctggctagtttttgtattttttgtagagacagtgttttgctatgttgttgtatctggtcttaaactcctgggctcaaaccttggcttcccagagtgctgggattataggtgtgagccactgcacctggcctgtgtgtgtgtgtgtgtgtgtgtgtgtgtgtgtgtgtggcggggaggggataggattgttctttgtcacccaggctgcagtgcagtgtggcgtgatcatggctcactgcagcctcaacctcccaggctcaattgatcctcccacctcagcttcctgagtagctagtattacagatgtgtgcaccacgcctggctaatttttgtatttttttggtggagaccgggttttgccatgttgcccaggctaggagttgactcttgctgttggacatttataagttttgatgaatgtataatgacatgtattcactatttttttttttgggggggacagagtctcactgtgtgccaggctggagtgcagtggtgcgatcttggctcactgcaacttccgcctcctgggttcaagcgattctcctgcctcagcctcccgagtagctgggactacaggcctgtgccaccacgcccagctaatttttgtattcttattggagatggggtttcaccatgttggccaggatggtctcgatctcttgacctcgtgatctgcccaccttggcctcccaaagggctaggattacaggtgtgagccactgcacccagccatattcaccattataatatcagacagagtagtttcgttgccctaaaagtcctctgtgctctctctattcatgccaccctccttttccccaagccctatccactgctgatctttttactgtctccatggtttagccttttccagaatgtcctatagttggagtcattcagtatgcagcatcttcaggttggtttatttcatttggtgataagcatttaaggttattttcgtggcttaagggctttctttttttttttttttttttttttgaggcagagtctcgctctttcacccaggctggagtgaagtggagcgatctcggcttaccgcagcctccgcacccctcccccacaggttcaagcgattctcttgcctcagcctcctgagtagctggaattacaggcacccgccaccatgcctggctaattttgtatttttaatagagatgggatttctccatgttggtcaggctggtctcaaactctggacctcaggtgatccacccaccttggcctcccaaagtgctgggattacaggtttgagccactgcgcccagcatttttttttttttttttgagacaggatctcactctgttggattgcagtggcgtgagcacagcttgctgcagcgtcaacctccagggctcaaatgattctcctaccccagcctcctaagtagctgggaccacaggcctgggccaccacacctggctaatttttaaatatttggtagagacaaggtctcgctatgttgcctaggctggccttcgactcctgagctcaagtggtccccacgcctcgacctcctaaagtgctgggattacaggcatgagccaccttacccagcttcgtttctttttagcactgaataagatctcattatctggaagcaccactgtttatttattcattcacctattttttttttttttttttttgagacggagtctcgctctgtcgcccaggctggagtgccgtggtgcgatctcggctcactgcaagctctgcctcccaggttcacaccattctcctgcctcagcgtcccgagtagctgggattacaggcgcccaccaccacggccggctaattttttgtattttcagtagagatggcgtttcaccgtgttagccaggatggtctcgatctcctgacctcatgatccacctgccttggcctcccaaagtgctgggattacaggcgtgagccaccacgcctggcctcattcacctattgagtgacttttttttttttaaactttttttttttgtttgcacgttctggttgcacgttttggcaattatgtgactgatttacattaaaaaaatttttttgagacagggtctcactctgtcgcccaggctggagtgcagtggcgtgatttcggctcactgcggcccatatctcccaggctcaggcgattctcctgcctcagcctcccaagtagctgggactacaggtccgtgccaccacgccaggctaatttttgtatttttagtagagacggggtttttagtagagacagggtttctccatgttgcccaggctgatcttgaactcctgagctcaagtgatcttcccccgtgcccgggctcccaaactactgggattacaggtgtgagccacctcgcccggcctgattgattgacatttaatgccttccaagaggctgtttcactcctttcccactgagaggcaggaaaggagctcccgtttgcttcctgctggtgtgtgtggggtgtatcttgtctttgcaggactctggaagctggtgggtgtcaccaggagtgtgaatgggtctgtgtgtgtgcactttgtgggaggaatgttcataagccagctctgcttctggaagcatgagccccagccatggtttgggccaacgcaggtgccaccacggcgacttgttttcctcccttgcgggtggaggcctccgctcactgcagggctgccccacaggtctccttccgctaccactgccagctgtactccgagtggagaaagaccaaccagaaagttcgcctgaagatccgggaggcggacagccccgagggcccccagcattctccactggcagctggactcctgaagaaggtggcagaggagacaccagtatgaatgctgggctctccggaccctgcagcagagaggccagaggtagctggtgataccctgtcctgtggaaggacttccacttcaacacttccacttcaacagttcccgcacggcctgaacgcttcttaggccaagagacaccatgcagagcctagtctgtgatcctgtgtgaagatattttcagggtttttttttttttttttttgcatatggaggacaggtggacatggtcctgagctctggacggagcaggcaccctgatctcattctgaggtccacatggcaccttctgggccagcagctgtggccggtgtatcaagggcgcccttaaagctggaacattccagcaagcttcttgcgcttctctgcacccggcaggcccactttcctggcaccctcgactttatataaaagttgcactgcgtttcaaaaacccacccctgaatgaataaaaggagccctggctggacaaaatggacttgtcagttatgtttctcaaaggaggcctcccagggagggaccacatggaggtaaaaaaataacactggcggccagccaggtgtagtgactcactcctgtaatcccagcactttgggaggctgaggtgggtggatcacaaggtcaagagatcgagaccatcctggctaacatggtgaaaccctgtctctactaaaaatataaaaattacttgggcatggtggtgcgcgccggtaatcccaggtgctacacaggaagctgatgcaggagaatcgcttgcacctgggaggtggaggttgcagtgagctgagatggcgtcactgcactccaacctggcgacagagagagactccatctccaaaacaaaacaaaacaaaacaacaacaaaaaacactggttggccaggcacagtggctcatgcatggaattccagcactttgggaggctgaggtgggcggatcacaaggtcaggagttcgagaccagcctagccaatatggttaaatctcgtctctactaaaaatacaacatgagccaggcgtggtggcagatacctgtagtcccagctactcgggaggctgaggcaggagaatcgcttgaacccgggaggcaggggttgccgtgagccaagatcgcaccattgcactctagcctgggtgagacagcgagactctgtctcaaaaaaaataaaataaaataaaaaacaataaaaaccactggcttgttttgagggatctgttctgaagcccatgggaagaagcaaaggctcagtcttcaagtaaaaatcaggtagcagggttataaaaatgatttttaaaatatacatacgggctgggcatggtggctcatgcctgtaatcacactttgagaggccgagatgggtggatcacctgaggtcaggagttcgagaccagcctggccaacatggtgaaaccccatctctactaaaaatacaaaaattagctgggcgtggagacgcacacctgtaatcccagctactcgggaggctgaggcaggagaatggcttgaacctgggagacagaggttgcagttagctgagatcagttgcaccactgcatttcagactgggtgacatcgtgaaactctgtctcaaaaaataaaaaatagaaaaataaaatagacataagaacaatttcctcttactttgcatctgccagtccacagaccatgctggcctctgtttttctttttttgagatggggtcttgctctgtcacccagattggagtgcagaggcacaatcacacagctcactccagcctcgacctcctgggctcaggcaatcctgtctcagcctccctggcagctgggacaacaggcatgcaccactgcgcctagccactgttagtttttagttaagtgtagagagtccagcatgggccaggcctggtggctgatgcctgtaatcccagcattttgggaggcttcggcaggaggatcagttgagcctaggagtttgagaccagccttggcaacatagtgagaccctgtctttactaaataaataaatatataaatatatatatattagctgggcatggtggcatgcacctgtggtcacagttactcaggaggctgaggtgggaggatcccttgaatccaggagttccaggctgcagtgagctataattatacttctgttgtctattctaggcaacagggcaagaccctgtctctaaagcaaacaaacaattttttaaaaatggtgacaatatccacgctgacttagggtgactatagattaggcatagttccgagtctctccctcctttgactgtcacttgttagggaagaagtggttattacctacattttacaggtgagaagactgaggcccagggcagggaagccttaatctaaggtctcagagctgtaggaagtggagccggggtgacaccaggactccttttggaggaagactcaggaaagatgcagaatacgtgtttttttttttttttttttttttttttgaaacagagtcttactccatcacccaggttggagagcagtggcgtgatcttggtgatcttggcttactgcaacctctgcctcccgggttcaagtgattctctcttgcctcagcctcccaagtagctgggaccacaggcagctaagttttgtatttttagtagagatgaagtcttgtcatgttgaccaggctggtctcgaactcctgacctcaggtgattcacctacctcggccccctaaagtgctgggattacaggcgtgagccaccgagcctggcccagaatgcagttaatctaataacaacacctacttcttcagcgctttctgcctgccgattcttttatatttaaaggctcttggcatctgtctgcttttaaagctcagggcaaccctgaaaggtgagttctggtgcctttctttctttctctctctctctctctctctttcttttctttctttctttcgacggagtctcgccctgttgcccaggctagagcgcagtggcactatctctgctcactgcaacctccacctcccgagttcaagcaattatcctgtctcagcctcctgagtagctgggactacaggcgccaaccatcatgcctggctaatttctgtatttttagtacagatggggtttcgccatattggccaggctggtattgaactcctgacctcaaatgatccacctgactcggcctctcaaactgctaggattacaggcgtgagccaccgtgcccagcctggtgcattgcatttcttattatccatattttcagttaagcaaactgagcctcagagtggaggagctgattgctcaaggtctgttttccatatgaatccctgcctggtatgtagctcactcacaaaggaagaaaaactttctgcctggactggaagggcaaggagaagcctgtgtggccatgggagtggaggaaacagctaagcacaaaggcccagaggctggaaactgcttagcctgtaggaagagcagcagggaggaaccccagggctggagcagtgtgattgaggggcaggtggctggagagatgggcagggcctcctaggcatggggtgactgacgcaccagtggtctgcaaaaacggagcatcacaccagtgcgcatgagctctcctgccccttgggggggccttccttgctcctgcagctgaactccctacacagcctgacacccatctttcctcaggccaactttggcctgtggtgccccaggagttgatgtacagatgcctcaggacatgccatgaggaagagagagacgagatggggtgactcatgcctgaaatcccagcactttaggaggccaaggcaggaggattgcttgaaggctgggagttagagaccagcctggccaacatagcaagaccctgtctctacaaaaagagaaagaaacagagagagagagaaggaaaagtgttttctttgcaaatctattctaatactttcatagagaagagttttagtttggtgttaacctgtctttaataatcctctaaggaccagcacagtggctcacgcttataatcccagcactgtgggaggccaaggctgtaggatcccttgagctcaggagttcgagaccatcctgggaaaaacggcaagaccctatctgtaccaaaaaataaaaataaaaaattagccaagtgcagcggcgtgcacctacagtcccagctacttgacaggctaagcaggggaggatcgcttgagttcaggagttcaaggttgcagtgagctatcatttacaaaggtagattgaaatattattgataggctgggcacggtgactcacacctgtaatcccagcactttgggaggctgaggtgggcagatcacctgaggtcaggagtttgagactagtttggccagcatggcaaaaccccatctctactaaaaaatacaaaacttagccaggcgtcgtggtgtgcacctgtaatcccagatacttggaaagctgatgcagaagaatcgcttgaaatcaggaggcggaggttgcagtgagctgagatggtgccactgcactccagcctctgtgacagagcaagactgtctccaaaaaaagaaaaaaatatattattgataatcgctgcattgaaggccaggcgcagtggtttacgcctacaatcgcagcactttgggagcctgaggcaggcggatcacgaggtcaggagttcgagaccagcctgaccaatatgatgaaaccttgtctctactaaaaatacaaaagttagccgggcgtggtggcatgcacctgtaatcccagctactcgggaggctgagacaggagaatcgcttgaacccaggaggcggaggttgcagcgagccgagatggcgccattgcactccagtctgggcaacaagagcgaaactccgtctcaaaaagataatcgctgcatcttactgcccaagttgccacaagcacacgtaacatctgatggtgccaattcgactgtctgcacttggaaaatggcacattggaggctgcacagcaccataaaactgatgccacgaatgcacacaaaaataagaccatacagcattatgcctagtacagaatacaccctgaattctgtcacagttcactttatgcaacattgcaagagtcctctcgctctttattattatttttaatttttttgagatggggtctcactctgtgaccaggctggagtgcagtggcccgatcttggctcactgcaacctcctcctcctgggttgaagcgattctcctgcctcaggctccccagtagctgggattatgggcgcctgccaccacacccggctaatttttgtatttttagtagagacagggtttcatcatgttggccaggatggtctgatctcttgacctcgtgatccacccgccttggcctctcaaagtggtaggattacaggcgtgagctgccgcgcccagccattaattttttttttaattttgtttttaacttttaggtttgggggtaaatgtgaaggtttgttaaataggtaaacacttgtcatggaggtttgttgtacagattatttcatcacccaggtattaagcccagtactcaatacttatctttttgttttttgagatggagtctcagtctatctcccaggctgcggtgcagtggcgtgatctcggctcactgcaacctccggctcctgggttcaagcgattctcctgcttcagcctcccgagtagctgggattacaggcgcccgccaccacgtccagctaatttttttatttttagtagagacgcggtttcaccatgttggccagtctggtctcgaactcctgacctcaggtgatccgccgcctcggcctcccatacccaaagtgctgggattacaggagtgagccatcgcgcctggccccattattagtgaattttaacagttttccgtttcttctggacgaactgtttgcaattataatgcgaattacggataatactctgatattattccatgccgttccgttgttgcctacaaagttcgcgctggagaaccgcgcaattgcgttacaaaaagaaaaaaatcacacaaaaagacacaatgttttaagaaagtttacgaatcgtgtgccggaccgcgggttgaacaagcttcatctaaaacttccaggaatctctagacaggatcattgcttcccctctgctccagctctggttacagaaagctgagagtgactaggtctaggtgtttgtgtggggtggggtggggagatgcctcctctatcggactcagaggacgcgcgccgggaacagccagtcggtgcctaacgcgagtgtatctcgagagagaagcgatcaacagctgccggtctgcgcctgcgcgcggcgggggcgtggcccggggcgagtggggccaaggaggcagccgggagcggcgggcgcaggtgttactggttgcgtcgggtcacgtgggcgcgcaggcgcagcgcggtgcagcccgttcgctcacacaaagcccagacgcggagaaaatggcggcaggggtcgaagcggcggcggaggtggcggcgacggagatcaaaatggaggaagagagcggcgcgcccggcgtgccgagcggcaacggggctccgggccctaaggggtgagtatcccacggtcctttgccacgggtaagggttcctctccgcggccgacgcgggcggcggctccgttaggtctgttggcggcctagccccggcgcggcctcggccccggctgttcccgtaccgcctgctcagggtagcggcgtctagggccgtgagcggggagccgggggagcctccagaatcgtcccctacaccgggcctcgagcctcgccaccctcagtccctccaggccggggccaaccccgtagtcgaggcctcaggcccagctgctgcgcatgggggttgatggcgcgggcccggaccggagagcctccgaggcctacccgaccgctccccgggagggtgacctcgggggccgggtttcagccccccgtcccctctcctcccggggtctgttttctgatccgtaacgtggggggaggagagagggtgcgcgcccgggaggcctcgcgcgcagtcagcccgagtcaacggtaaccgagcgagggaagcgtcaggaagggccgcgaagccgggtcggggggctcccctcctgccccgccccttagtccccgcgcgccgaccgcgctccgcgggaagtgcctccctcggaaccgcccctcgccccacgctctggccctggctcaagtccctcgccgtttcccgctcctcctccccgggtgcgccgcaggtattagtggagagatgggatctgctgcttagcgttcaccctcggaagcagacagatacgaagtcgggggaggaatcccctttttcccgtgtttcggggaagctgttctgtcaggaggcgggttcatttacttccagacttcatcagcttttcgagtcctgcttggggctctttgactccttggcttttaaaagtttctttaaaggaggaagcatcgacttgtgccccggtgaaactcattcattctgattacagacacttaagagagacagagaggttttggctccaagatcagcggccgggaaggaaggggaagcctgggtacacattgaatttcccagacatttatttcattgtggtaaaatagacataacgtagactttgccattttaaccattttttaagcgtataattcagtggcattgagtatactgactcagtgtgctgtaaccgtcactgcttcatgtccagaactttttcatcatcggaaacagaaagtgtagctattaaatactaactccctccgttttctttcctttctgtctgtgactttgccttcctcatattgtaatgtgtgaagcttagtttatggagattaaaagtgaatgcggttgagcacttatatatttaatttttttctttgagacagggtctccctctgttacccaagctgggatgcagtggcacgatcacagatcactgcagcctcgaactcctgggctcaatcgatccttccatctcagcctcctgagtagctgggatcacaggcgcggcaccaccatgcccggctaattttttgaagagaggaggtctccgggtgttgcccaggctggtctgaaactcctgggttcaagccatcctcctgcctaggccttccaaagtgctgaagttacaggcatgagctactgcgccctgcctagttgagcgcttaggttaagaacgttccctaagtgctagctatattggtagataataaatccggagaaaattccagattctttccctccttaagtagggagaaataaaataccatggttactggcccttagaaatgagaaaaacttcctctattcccagcattttactattgaaaactctgggaaggaatgtgttaattttgactttttcagcgtctatctacggaagctggtaggatttctgagggtggtatttggagggctttaagataaatttatttaccgtatgcaggaaggagtgctggtagaaccttgctagatgatagggtaaattaatagattacaaattttcccttttcccctgtccattttcaaatagtcattttgtgactgagtcattttacaaatacatgtggactgttggaacctgaaaattgtagaataaaatagccgttgtgagaaagaggctcaaagtctcaaagtctagtactagcttcatagaggatagtttaggaagctggcaacacttggatatttttgatagggcctgtggaaaacttttttttttttttttcattacaagtcttaaggaaatctctttagaagcctatacttttgcactccatgcagagtggagaggccattaacatatttgtatgttatgtatgttatgtaattaccataacataaggtaattatgctgtgatagaagttagtggagttgcttggtagaaagaatggaggaggtgacctccgccacctgctgggggcagggacctgttcctccatgacaggaagacgtgtggaagtggaggagaagaagatggttggggaggggcagggaagagagtatccaaagagcagagatttgagtgtatgctttatcgagaactgaagttgtgctgggtgtagtggctcacacctgtaatcccagcactttgggaggctgaggtgagaggactatttgagctcaggagttcaagaccagcctgggcaacatggtgaaaccctgtctctaccaaaaaaaagaaaaaacaaaacaggctgggcccggcggctcacgcctgtaatctcagcactttgggaggccgaggcgggcagatcacgaggtcaggagatagagaccatcctggctaacacggtgaaaccccgtctctactaaaaatacaaaaaattagccgggcgtggtgccgggctcctgtagtctcagccactggggaggctgaggcaggagaatggcgtgaacctgggaggcagagcttgcagtgagccgagattgggccactgcactccagcctgggcgacagagcgatactccttcttcaaacaaacaaacaaacaagaacactgaagttgctatagagttttaaggttggagcactggcagccagctgatgggcagtgaatttggatttttatcttgaaagcctttgagagacaggagaaaaatagaaacttggttctttggaattctttctctaccaggagtggagtgtgcagtagaccacaaatgcagtgagctagcaagcttgatctgggaacccaggttggaaatcttgttttgcagttacttctctcctgggtgtgagaataggatttgcttaattttgatgagaagtctgttccaattaaagtcagcaaagattcagagttagggtatagtcagggaaaaaaaagttcattttaggggaatgtataggtttttaaaatttttttaaatgtagtatcatatataaaataaatgacttaacctgctccccttcctgagtaatttttttttttttttgagatggagtctcgctctgttgcccaggctggagtgcagtggcgcgatctcagctcactgcaagctccgtgaaccgcttcccgggttcacgccattctcctgcctcagcctcacgagtagctgggactacaggcgcccgccaccatgcctggctaatttttttaatatttttttttagtagagatggggtttcactctgttagccaggatggtctcgatctcctgacgtcgttatccgcccgtcttggcctcccaaagtgctgggattataggcgtgagctaccacacctggccccttcctgagtaattttgtgggtgaataagaaacagatggattggttatttataaaaataaaaatatatatttagggtagattcctgaggaggtactgttagagttgactccatttgacaatcaagaaaactttcgttttaaacacttaaacccaggttcaggaacctgacctaaagactccaggggaggccctcctgactcccaggcagcttgctgctttcatgatactaccttggtaaccactcagtaaacagccgtttgaattgttttatttaaatcagattctctatacaatgcatttgagtgtttgctgtactttaaagagtgattgtttattcaaaaaggattttggagacacgtcagattgtgagctcaagattagaagacagggttttggattatttgaatgcatgctgccaggcctttgctttcactcagctctttgattttattctggttagggaaagagatactagcctgcaaagattagcttgcttgtttttttgggagggggggttctccaatggacttccccattaccatattttgcagtcatagggttgaaagctaaattgtccctttgctagtctgtaatgattatgatgcctaggttttctcagccttggctctggtttgctagttttaaagcctgaacagtagaaggctaggagtgaatcagtccccctctctacccttctcaataaaattattggtagaaaaatacatcattgcctcactgtgtgctaagagtctcttttttttttttttttgagacggagtctcgctctgtcgcccaggctggagtgcagtggcgggatctcggctcgctgcaagctccgcctcccgggttcacgccattctcctgcctcagcctcccaagtagctgggactacaggcgcccgccactacgcccggctaattttttgtatttttagtagagacggggtttcaccgttttagccgggatggtctcgatctcctgacctcgtgatccgcccgcctcggcctcccaaagtgctgggattacaggcgtgagccaccgcgcccggcctaagagtctcttttaaagctgtaagcgtgtaggtagtagcctccataggaccgaggcctagtgacgacatggtgaccccagctcttagccacatgcagtactgcttccctagatgagctgctttttgttttgccattctttgttgattgtcacagtgtccctctgagctaccatgcatacaggttgcgctggttttgctggtaaagcgctagagacagaaagagcttgagtcatgtgggtagttcagtggtggccttggagctggaatggtgctgtgaatagtgctctccacaccttacatgcattagagcagcgcaggacttgagggatttctgtgaagaatcactttatataagggatggttctcacacgggcagaggggtccttgtccctcaggagatgtgatcacaatttcagggtattgggattgccatttcaaactgcaccctttccttgattagaaactccaaaagtagtgagtgttacgcatgggaactgcatggagaccttaagagagggtaggcagtcactatttggtggtggtcttttgcagattaggcactcaatctttttattagggtttttttgttttttgagatggagtttcactcttgtccctcaggctggggtgcagtgtacgatctctactcactgcaactccagctcctgggctcaagcgatccttccacctcagccttctgagtaaataggaccacaggcacatggtaccatgcctagctaatattttgtagagatggtgttataccatgttgcccaggctgttcttgaactcctgagctcaagtgatccgcccaccttggcctcccaaagtgctgggattacaggcattaatcgtatttttaatttaatttaattaattattattattattattttttttttttttgagatggagttttgctcttgttgcccaggctggagtgcagtggcgctatctcacttcactgcaacctccgcctcccgttcaagtgattctcctgcctcagcctcccaagtagcgagtagctaggattacaggcacccgccaccatgcccggctaatttttggttttgttttgttttgtttttgagacggagtttcactcttgtcgcccaggctggagtgcaatggcataatctcggctcactgcaacccccgcctcctgtgttcaagcaattttcctgcctcagcctcccgagtagctgggattacaggcgcctgccaccacgcccagctaatttttgtatttttagtagagacggggtttcaccatgttggccaggctggtctcaaactcctgacctaagataatccacctgcctcggcctcccaaagtgctgggattacagacgtgagccaccgtgcctggcctaatttttgtatgtttattagagacaggtttccaccatgttggccaggctggtcttgaactcctgacctcaggtgatctgcccgcctcggccccccaaggtgttgggattacaggtgtgagccaccgcgcccagccaaaagttaaaaagacttgcagagttaagtttttatatgtacgtatacatatacatggactagagaagaatcttcccctaattttgtcctgaagatagtgagaaaataggattggacatgttaaaaaaagagcttttcaggacatcacttttatactatcacatcatctaaacttgaatatgtccctccccttccccttccccttcccttgccgagacagggtctcccgctgttacccccggctggagtgtagtggtgcaatcatggcttactgtacccttgacctcctggagccagactgtcttctttctgcatagctgggaccgcagttgtgcaccaacatacctggctaattttttgtattttttttgtagggacacggttttgccatgttacccaggctggtctcaagactcctggattcaagcactcagctcacctcagcctcccaaactgctgggactgcaggcatgagccaccatggccagtctgcttgaatatgtgtctcgaatgatatttctttgagggtcattctctacaagtctgtcaagaattagttggtggtggtagatttccaaaaaggtcaattttttaaaagttggaaatgacaagagatagttctaatctctttactgaggaaacctctcagagggaatgattagccagggaaggatttgtttgcagaggtgctgtgcccattaagcatggtgagagccgctttctcaatggtgagtcatgtgatgtggattaaccccaaaccaaatgctcagcttctgtggttagattggatagtttattcgtagccatggtatgcacctgtggaatataggttagacactttgttacctgctttggctgtaattatttatttatacatttcgtagtttataggtgagcttaagcagtctggtgaaagactggaaataattcatcatggactctgtcagaatgttttttattgtaaatcttaaagtatttgggacttcaaaagtaacaatattaaaattcatttccatctgtgaatcctctggtggaccatgatgtgtagattctgttatgttttatgattttttctaacacagtcgtcgtcattttccaggaaagagtaggagatgatttggcagatagattttgtttggcagactttggtgaaggactttcttttggagtagacaagtggcctgggtaacagttgtaggtctcctgtgggacctgctttgtggtgtgaagccagtcttgtggactcaggtagattgcgttctaggcatctagggattggagctgccataacatcaccttatctgccagcccgtgggaagggaagcctgttgattgtgtattggtatagttgagagatcacagaggaagctgctttccttggttttaccttgtgttgatttgggtgtggctcacaccagtgatacctctgctgggataccacttggcactcttgtgtttggggactacacaaagttgctgactttaaaatttttccaagtaaatacgttactatttttgagacagggtcttgctttgtcaaccaggctggagtgcagtggtgcaatcatagttcactgcaatcttgacctcctggactggagccatcctctcagctcagcctcctgagtagctgggactacaggtgcacaacaccacactcagataattattattatttttaaaaataaagacagggtcttatttgtcgaactcttgggtttaagtaagattctcctgccttgacctcccaaagtgctgggattataggtgtgagccaccatacctggtctcaagtgaatacttttgtttgtttgtttggagacagagtctcattatgtcactcaggctggagtgcagtggtgcggtctcagctcactgcaacctccgccccccgggttcaagcgattctcctgcctcagcctcctgagaggtgggattgcaggcatgtgccaccacgcccagctaatttttgtatttttagtagagatggagtttcagcatgttggccaggctggtcttgaactcctgacctcaagtgatacacctgcctgagcctcccaaagtgctgggattacagatgggagttaccacacctggcctcaactaaataacattttaaaatagtagcttctccagctactatctggtgtttcttccacggaagaaagttacatcccagaataaagatcggctcttcagttaaagatacttttataaatcattaatactgtagtcttggctttttggttttttttccggttttgtcatggattacaaattctgtagtagagcccgtggtctgggagtcactggattctcactggcgggacacacagggctggggaagcagaaggtgcaaggctcagttgcttaagaaacttgaggtggcttctggctcctcacttgttcctgatcagctctaatctgtgcctccctgtagtcagaggggttgcgcttgagctggcagctgaggaaagcgccctgtcagccagtgcccgggcttccaagcctgatggctgctacctagagatggttagtgttaacagtgtggtggcacctagcacacaaaggtaaagagtgcaatgggaaggccgtgccagaaaagcagccacccttctttgccaaaggtgggattgtctgcatgctgtcttccacctcccagggttgctcagacccaagtttcccagcttcaaagtagtaggattgtgtagggagtggtttcttttccacctttctggatttttaaaaagtggttaaaatatacataaaatagaccattttaaccatcttaagtgtgcagtgaagtatgatgttttgcagcaatctgcacattcctggaacttttattctcatcccacatgaaattctatgctcagtatttaataacttcccatttctacctccccctaggcccaggtaacctctgttctactttctgtgtatggatttgcttattataggtatttaataagtggaatcatacaatatttggccttcagtgactggcttatttcactgagcataatgccctcaaggttcatgcatgttgtagcctttgtcaggatttccttcctttttgtggctgaataatatcccattgcatggatagtccgtgttttgtttattccattcatctattggtagacacttggttgtttctaccttttggcttgtgtgagtagtgctgctatgaacattggcatatgtgtatgagtccctgcttttaattcttttgggtgtatacctagcagtggaattgctgggtcatagtaattctgtgtttaattttgagtgactacctaacttttccatggcggctgcatcattttatgccccccccccctttttttttttaacactatgaaagacacttatttgtgaagctaaaattggatgggcctatgtgtactacctcatatttccattctatgaagtcttagaaatcatccctctcttctcctgtttctgtcttggaattaacacaccttggtcagggagttggcctcaccattgtctctgttactgtccgtaggagtattttgtgagcccaggaaggtgtacctttccttgggaatgctttctgccctgtggagccttgagtttgaatgtcttaattcaaaaccaacattagtcttgtctttgctttttttgagacagggtctcgctctgtcaccctaggctggagtgcagtagggtgatcatagtttgctggagcctcgaactcccgagtttaagtgatcctcccatctcaccctccctactagctagtactgcaagtgcaccaccacacctggctaagttttatatatatttttttgttgttttgacagggtcttgctatgttgcccaggctagtcttgaactcctggcctcaaatgatccccccttcttggcttcccaaagtgctaggattacaggtgtgagccaccgcatctgaccaatactagtcttgtgtcatatgtaactttgtgtggaattgtaaacctggcaaatcaaataattatctttcacattgtgctgacatataaaccctttacctttttttcctctctctcgaattcagtgaaggagaacgacctgctcagaatgagaagaggaaggagaaaaacataaaaagaggaggcaatcgctttgagccatatgccaatccaactaaaagatacagagccttcattacaaacataccttttgatgtgaaatggcagtcacttaaagacctggttaaagaaaaaggtaatggtactggtgattgagtagggtgagaaggttggtgtgtcatcttttctgtggctaattccttggttatttttggtcagtggaagcggctctgggtagagcatgttctttccaggcttaagagtgaagcccccttaccccacctcagttttttttttttgttttgtgttttttttttgttttgttttgttttgtggtcatacccctgtgtgtcaaacaggatggtttgtatggtcctttggcctacagatgattttactggcttagtatggttaataaggcttcgattaggcttccggggagccttttcgtgttgaaattttttgaattttgcacgttaggtgggagagatttttcctttctttccttttttttttttttttaagctttttaagtttcacaggaagatagcttgtttaaaattttgtggatgtcttcctgggatcaaaatgtggtagctggaccttatgcttctcagattccaaactataaaacattagcttgtattttaacttttaggctttttcccctctgggaaaaaatagagtagactggccattggagagctcaaaataaggtatctgctttgtaacgcggtgccttaggatgtggattgtcatagcctaggtgtccaccttccagccgagggcaggggaagcagccaagctctgctgccaccaggaggcccgaggaggcctgcctctgtgatcctcacccccgtgcacactgtggtgtcctctctctctccttcttccctcctgtgctgctatcgtcttcctttctttcctgattcttggccctgctggtggcacttaggactaaagagactgctcagccctgggttagacaacaccgtggtagagaacaatttgtatattgccttgaggcgccctccccgcaccccgacctagactcaaactacccttcatggagtctttgcatgactgaaaggtattggttttctggagcattcattatgaaaagagatgtgagcttgatttgtcaaatgatttaacatttcagtgacagagatgccccgtggataggccattttggtatgtgtactggtgctccctgcattggattttgaaattatgaatggcactgccatcattgtcccatcccttattttgaccatgacatgcaagaagcactaggcactgtgaacctctccgtacagtcacgcgtgctgctcccacgtggcatttctccagataacacagatggaaaaacgttttggtgtgagattgatgtgcctgccttgatcagccaaatcattcctgccaatgctcctagggcaagagtgcagtttcttctttttgtctgagggtgtgtcatgctgcatcccagatgcagtgttcttggtttttgggactgctgcttcaatagaagcttagaatttctgtacagtacagttgggcctcattcgaattagcttttggaataacctccaaatttgtgttctcgtgatttggttgaaccgctgaattgctatttccattgataataaggtatagtagttccaagaaccaggaatgtggctttgaaaatgcaattgttagaattttgtaagagattgcaggccaaattattttttcatttttaggagtgtgtgaaccagttttgggacatgctggatgaagtaggtgacatttttactgctttaccattcagtaattcggtttgggaaaccttaaagctggtagtagcagcagcagccatggtgtttctggatgtagaagcagttcacctcaattcactattttgcactcttaagtgtggagccagcctggtggttgattgggatacttccaaactggttctcatattcccctggcatactgctacgaatgcctgggctcagccctctcagtgtatttttggtggtgtaatttagaattacaggtgtgcagtaaatcagttatttttaatgagccttaaaatgttcttgtttagagctcccctgtactggttaaattaattactttgctgtttaattaaattattagcggtataggattgtgggtaaagtgactcagaaaggtaatctttttatgataatgcttatattcagtatgtgaggtctaaagaaatttactgtgtttacatacatatgacttcttaagaaatactcttcttattacgtgctttcaaaaagacgtttttattcccgttttggtgtacaaaaaatgtttaagtggttagtttaaatctgaaatatttacttgaaatttgttgcgcataagttttaagtgttttgaagactttatacataggaagaactggcagatagaggcacttacaaccctaaaagtattagtctcaattccaaaacacagagatctgggctgttgtaacctaagcactctttatcagtctgtgttttaaggtctgatgaatcttagccttgtttcaggaaatgagtagaacaagaactggaattagttgtcctcaactgaaattttctgtcattatagcactatctaattgcagcctctcagaactaaagtagctagctttgagaggcccaagaggggagctttttttctaaggatactccggggggagattgtctcacatgctcctccctcactcttgatcctcttccccatctttcataccagctgcatattctccagctttaattttagcatttagcagcattctagcatttcctattaaaaatccacataggaagtaaactggtcatttatgcctttgaaagtgacttaacaggccacagctccccaggttgtatcctgacaggtaaagggatacacatcttaaagtgattgaccataaggactgggtggaaaaaataaagatttctgtgagaaaaggcgatcttaggcttttaaacttagtgtcgtgctacatttgtttgagaccaagtcctgtatgagtggaggaagctccttgctgggctgcttctcttgacctcaccaggcagccggcagcacccaggtggggcagtgccaccagagcaggactgagctgcacctgcagtgagtaaatagagcccaggttgaggaagaaaggaaggtcagggatgtagtttaccctcagtcgatccgaagtttagcagcagtcagttcaacttgtgtaagcaaagatttcttttaagcacttaatccttctgttagtataatacaccactttaagtaaatttcaaattgcatctgacagaaaactaaggcccagagggcaagtgtagtccagtagaaaacctccatcttggctcctggagataatttgcattgtgggtctattaggcagaactgtattttcaatttaaatgatattcctacccagtctacttgcttcttcatattttcctctgttggaaatgcagcctgtattttatttattttgtttttgagatggagtcttgctcttttgcccaggctggaatgaagtggtgtgatctgcaacctctgccccctgggttcaagtgattctcttgccccagcctcccaagtagccgggattaggcacccaccaccacgccgagttaatttttgtatttttagtaagagatgggctttcaccatgttggccaggctggtcttgaactcctgacctcaggtaatctgcctgccttggccttccaaagtgctaggattacaggcctggccgcagcctgcattttagaaaggcctgttatgctaaagcgttcatatgtatgaatacttaggttgagccccagcagtgcagcctgtctggcttaccccgtgtggtctctggtgttagggaagcagtaacgttctgttattgccacgcaattgaggagcgtgggctcagtcatttcctaacatgtccataagccaagtaggtgtgtagaataattattttgccatgtttcaaggtgtctttatattaaagagtgtgcatgtgttctgtgcactcccctcgcccaatagagtggcagcctgagaattgaccgttatgagatgaagaatgtttgacaacatgcctgactttcaagtccccccaactcctgttaaaaaaaaatatataggtcttataacatgtgaattctcttcagtgaagcttcggcactgtattccctctttttttctttttcagacttgagcagtaaatgggaacacaaaaacaaatactcatttggctaaaggtctgtgcaggagagtgaggtcacagtagctcccagggaccgcctgagttctttttgggttgctcatctgcttatcctcctgatgtgttttaagaataaggcagtctttttaataattcacttaaatgttggtcaaaaatgatttcttagagcattttaaatagaggtagataacagttggtgttagattttttaatgtcttagttttttcaatattttgatgttttaagctgcagtagaatttgtcttagcagcctactcttgggattccatgaattccatccatgtttacacagggggaggagcaaccgtattttttattaataactgtgagtgccgtttctgtaagactgctgctactgccaagctgtcacctctacccctgagtcctgactgtgtgatctgctctggatggtttgctcgttaaacttcacttcatggaatgtgaccagactgtttacttgacaaattttgccctcacattcttgtcgatagttgtactgactacataaaataaatctttgctttgctattgtagaaccaaaagggaggtggtcttttaaaggctccattttcctataggaaagtatgaattagcagctattgcagatcccttaacacttaatggatggtctctcagggtagaggttggaattttatgagtttgtgaggaggatgggcattactgatgatctcagggacagcactactcatgctggacccccgggtgactgctaaatgatgataccacttgaggtaaaaagagggagaacgttttaagcaaatttttaatacaaaggattgagtcaggtgtgctatttctagactagactgttacgtggaaaaagtcctaatttctaaacctctctttttgttaaagtggttatggccatgggaaaaagtttggtttggatttgcttggtttctgggttgcaattacagctttttgatccaagcgtcttatggacacagactagaaacttcccatgcaactgggacttgaatttcggcaacatggttgcagctgttttgaattaattattgtgagtcttttattttttaaaggttattaggtggtagtcatagctggtaggaaatcaacttggggcctcttcagtcactattttgacactatgtggcattttcatcaaagtggagacaagggttggtggtccttgaatggctgctgctcttgaaacaaatggctttttaacatggcctcagggcggctgcatttttggaactgctttactttttaagggttaaataaagccgctttgtacaactgtcccttggctgtgatcatttttcagtttgccccacaggagtacatactctaaaagtaaattgtactgatccctcatatttccgttcttcatttctttgcactgatgattctcctgttttgtacaaagtgtcagtttcgttctgaaacatttcaggagaggacaaagagggtgaggctctagatgtaaactttggacacttggctttcttgccttcaaccaatgtgcagagccattaataaatatgtccttcagatctttaaattttttgtaaaataattttaccttgtttttcattaaaaatttttcttcctatagcctcataattttaatgtcctttaaacaaaagagttggaataggcatgacttgttgaggccgttaagcgggttatttttacccttgtactgctaaaccaaaccgatccagaggacaacaaaagcccattttttgcctttggagagtctggttagagatagttttctccagggtaacactttacatttgttttctgtgtgccatcttcaagttcagcagccattttggtggttgtcttgatggattctaacatctggtcatggtggtcatgaattggcaatccaaaccttgaggaaaatctgcagaaacttttgaaatgctttggttttttcccttttgtgtagattagaatcatatgagtctgtttaactgtttagatacaaaatctgagccctaaatttgaatttatttgtgtcctttaaatggggaggtttagaaagcggcaagaatgaagcctggcctaattcactgaagagaatccagatgctgctctggttttgtgatcttattatattcaaacattctgcctctacagatgtggagcctagtgctgtgtgcaggaccagctatagaatttgtggggcccaacacaaaacgaaaacaaggggcctcttgttaaaaaaaaaaactaagaatgtcatggcagcgataacagcattaaaccaagctcagggcccctgagtgcggggctctgtacaattgcacgagttgctcacctgtgaagctggccctgcggccgtgtgtgcctgtgagcttataccttcgcatacgtgcgtccttgtatttatagcatgtgagctcagcccgatggcatcgcaatttgtatgcatttcacctgcttgccaccaatgagagcgtatgtgtaaaacctcctcccttccccagaaaagtaaatcacgcagacttctttcctatagatttggattgcctctagtcatgaatgagtcttccagacagggaaattgatacggaaatctgtggaatagcttgtttgtggtgggaggaaaatcaaggacatattgttaacgtgttttcacctacttttactgcacacctgtaatgcctagttcggtggtttagagaatatggagtgtttctgggctttcttataaggcagaggctccatacaaggttgctgatgattgttctaaattcccattgttttcttggcttttctcccttggtttatgtgtcgtctggaaactgatttgtagttggtgaggtaacatacgtggagctcttaatggacgctgaaggaaagtcaagggtaagtgtctgagagaatttcttctgtggatttactacatgaaaaatgtaactgtatggtggcgtggaatcgaatgaaatcaggaaggcagtgagtgctcatgttacagtagctatgtttgattttgccaaacatttgagtggggtgggaggggatttgcaaatgggagtcccgcttttccaaatggctggccaaagagctttttggtattctgtttggatgcccaatttggataactggggaccaatagcagcattgtctctttgttaacagaggaattggctgtgtgtgaattatgcatggaattttagcggtggtataattaatgtaaaacgtgtgttcttgtctagaaaatgttactcttggttgtttgctgaatttgaaagttgtgtgaaccaaagattccgaaaagttgcctttgtgccagtaaattgtaaaccaaatattaaaaacctgaatgttcaaaattggcctagtttaaagagaacataaactattttctgtcgtgcaatagaatggcttagaataatcaaaaggatgagcttaacttacggaagggatggatttaggaggaatatggtaaggactcgattgagtacagagggaagcagatctaaagttggtgtgatttcttggagaccctgaatttaggtctgcttattaaatgtcagcagctctagtgcaatgctggtaacgcgtaggagaaggagatattaaggagcccagcttttaacaaggaaggcgaggcgaggcacttctgtcagcttccccttagaagggttcattttaaaagactaactttgtgacataaatcatatttttagtttgtttataactgtcattgatatttactatttttttcttttctttttccccttccttgctcttctgactggtctctggcttcctccaaagggatgtgcgtaagtatcgtctagttacttattggtatttgagccttctaacttgtaggactggtttcactcgactcgtttccttttgactctatagtgttgttgaattcaagatggaagagagcatgaaaaaagctgcggaagtcctaaacaagcatagtctgagcggaagaccactgaaagtcaaagaagtaagctcttgcttaacactgcggatactgtgtgtaattgttgagtgatcctactttggaattagggaaagacggtcatggtcccagacggcatttacaaagcaagtgccagcctgttgtttctaatgaagagtgtcggtcatagcctacagcagccattccctgcaaggactttggggtggtggccaagcagatcctgagtggctgctgaccaccttctaatatctgtgatttgtctgaggccttgttgtctcagggactctcaaaccatgagcccgtgggtttgtgccattaagttttactccatctgacccttcttcttggcccatcttttttctttttttaaaaagtgagtttgttccagcctgggcaacatggtgaaaccccctctctacaaaaggtacaaaaattagccaggcatggtggcgcatgcctgtagtcctagctacttgggaggctgaggcaggaggatcatttgagcccaggatgtggaggttgcagtgagctgagattgcaccattgcactccagcccgggcaacagtgagaccctgtctaaaaaataaaaaaataaagtgagtttgttattcctcaaacctgctttcacatctcatctgaatcaaatatattccttgaggaagaaggtttttttgttgattaaatccctcttggctgggcgcagtggctcacgcctgtaatccccagcactttgggaggctgaggtgggtggatcaaggtcatgagttcaagaccagcttgaccaacatggtgaaaccctgtctactaaaaatacaaaaaattagctgggcgtagtggggggtgcctgtaatccatctactcgggaggctgaggcaggagaatcgctggaacccaggaggcggaggttgcagtgagccgagatcgcgccattgaactccagcctgggcagtaagagcaaagctctgtctcaaaaaaacatccctcttaacttcttttcacctcttctcttggggaggaagatgagtagattcagagtgaagcttggtagggtctaaggtctctcatgtgttatgatgtcttttttagtgctgatggtggtaattgacaggacagagagttgaagaagagagtcagtacagagcttcacagaccttcccagatgttgttttactgcgcagccctcacacacacgcctccaacacctgaaggacttgaaggatgggggcgcttgtgtggtctagaactgtttctcaaacttctggaagccattgacggggtttgcagaagttacaaaaccccattgatgaattagtaagattcagctataccaagcccatgaagctctaatttcagtctggcggttctacattatatcagctaatcatgtttccctccctaccctgcttttcttttttacttagtgcaattgagagctgtgtttttagtgctacacttcatgccttttcttcctttcctatttctttagctggactcttctaagctggtagttgagttcatttgactttcttgttaatagatttgagagatgctttccaaacaacctttcagtttctaagtcttgagaatatcatttactgtgcaagcatggtttgcgttgtactgggtcagttaaacgtaacaccttttgtgcttgttttaggatcctgatggtgaacatgccaggagagcaatgcaaaaggtgatggctacgactggtgggatgggtatgggaccaggtggcccaggaatgattactatcccacccagtatcctaaataatcccaacatcccaaatgagattatccatgcattacaggctggaagacttggaagcacagtatttgtagcaaatgtaagtaaacagaaccatcgtctaaagtagaaaatcagaactttatgaaatgaccttgtcaatatgttataaaagtaattctcacatttgagaagaaaaatgtaaagaagggttttgttcttgatttctttaaaaatcagccttataggcgggctttgtctgcattcctaagtcacaggcttgaccgtggtctcgttggggctgtgattcctgagtttcgcaggtgtttccgcaagcagtaaccgagtctgcattctccgttggtttattttatgcagttttggtgcagagtaagactgtacgagcagaagtgcactgacaccttcctcttgttgtgtctggggtgaatgataatacctccaccatctgcaaggggaaatatttttagaataaagtaggttgggtggggtggggagtggtaaagcttatcagggaaacaattttttaaaaatgttcagaaaatgagtattaatttgaagtatgaggtgacttaagtttctgagaaaagagacaatatatttactataggtacagtttatttacagtgaaggccaggctttataatcctattttaaaatttccattgcagttgattagtttttgtgacattatttcctaatacttttttccaaccaaagcatgtatcattcatgtagtaaaaatgttgtgtttcttaagatgtttacattgaggtttttaccccgttctctctcgattagctggattataaagttggctggaagaaactgaaggaagtatttagtatggctggtgtggtggtccgagcagacattcttgaagataaagatggaaaaagtcgtggaataggcactgttacttttgaacagtccattgaagctgtgcaagctatatgtatccttctgcaggaattcaacttatgaacagtttgacctaaattgctgtgttagtaatgtaggtttgtgtgaggaagaggtgactgtgtgtattcatgttttttatgtgactagggggagtgcattactgtggaattaagaggttctctgggccggaccggtcacggtggctcacgcctgtaatcccagcacttcgggaggccaaggcgggcggatcacttgaggtcagttcgagaccagcctggccaacatggtgaaaccccggctctactaaaaaatgcaaaaattagctgggcgcagtggtgggtgcctgtaatcccagctactcgggaggctgaggcacaagaatcgcttgaacccgggaggtggaggttgcagtgagccgagattgcgccactgcacaccaccagcctgggtgatagagtgagactcagtctcaaaaaaaaaaaaaaaaaaaaaaaaggttctctgggggtggaattgattcaatacagtgtggatagaggggatggttacaacatgggcatatgcccatgagtctttctactgttttcttttcagaagagtctaggtttgaaggaggaagtccaaagaatgtgctactagagagaaagtggggttgttgtttcatgtgtaatacatccttataggacctcactctttccagtgagtagacatcattttggaagaggccacttctccttgaccctaggcttagcctagagtttttaatcccttggagagtaccccacaggagcacattcatacaactcagacaagaccgtcactgcatgtcttacccagaaaacatggtccttcagtttagatagtggtagatgcctggcccattggtcacattcagagaaccttgatgccactgcttaagaggatggtttggtgaaattgtaaggttacgaatgaagcttcacacctaaggaataagcggaagttgtcttgtcctccccgccagctttatttattgttccttttatgtttattgttgaaagtataatgaagaattgaaattgctcataaattcatcacttagagggactggtagcagttggagtatttttctttctttttgtatttctcttgtgcacatttttagaattgcaagaaatagccttaattgtaataccagctatgttcaatggccagctgctatttgatagaccaatgcacgtcaagatggtaagtcagtaggatctttctctgtgatatactcaagtctagcaaaaacatggaattaataagagtgtacatatagccactatgaaatatttgtggattagtctaagttaaatagggtgcagtatgttgagcaaaattgtgagagaaataacattttgctggtcaggcgtggtggttcacgcctgtaatcccagcactttgggagtctgaggcaggcggatcatgaggtcagcagttcgacaccagcctgaccaacgtggtggaactcctccgtctctactaaaaatacaaaaattagccgggcgtggtggcacgcgcctgtagtccagctactcgggaggctgaggcaggagaatcacttgaacgtgggaggcagaggctgcagtgagccgagatcgtgccactgcactccagcctgggcaacagagtgagactctgtctcaagaaaaaaaaagaagaaaaaaaaacattttgctcatggcagctcttgactgcattagatatttttccttttgcacagttgactgttcatggcgcattcaggaagtcacctgggtatcctggttgagcaagtgatccgtttcaaagaatggttatatatgtggggttccagtttttcaaagtattacagtataatgtttggttagcatcaaatctgttgtgaacataattaagtcattgattcagacagcttttaaaggtctgttggagcacttcaatcttaataaacatttgctctgccgtaactgtgccaaagataataattactacaggcatgactggaacatgctgagggcagtctagttgggactcaaattcaggaaaaagataaactataaagcaattttttcattactctaaatagagtaggtaagttttttgaatagatgatagattcacgtgactcaaaagtcaaaaggcatgaaaaggtagtgtgaagatagtgtgagtcctacttggacttcttgcccaggtccccatcatcccccacaataatatccatgtgtcttttcccttgacataaaataggaagcatgctccgcatgcctttctacccttgcgtattactccatggcgtggataatgtgtttagctggtcctctcttgatggggggccatttcagtcttttgctgttgcaaacactgctgcactggatactgagatttgtttgttttctttctctttcaggatgagagggccttaccaaaaggagatttcttccctcctgagcgtccacaacaacttccccgtaagtgtttcagtgattagggctgagagtttgaattggagttacactaataaacagaaaattaccatatggtttcacttgaacctgtgccaggttagccctcagttctcttggccagttcttttctatagatttttcagggtgagaaatgagcagagattcacaacttgaggatattgttaggattacctcatggtaatcctaggattgtaataccaggatgtagaggatgtggttaggcattttgaaagtgtcctggggaaggaagaatcagaacctgtgaagggaatgaaaaccaggctgcactctaattcagaagatactggttagtcccatgtgggctagcagtgcacactagacatctgcacagaaattcgcacgcagatgtttgcagcaggatgaaagacacatgctgcagtgtggatgaacctcgatttcatctacaggaaatgctccgcatagataaatgcataaaggcagaaagtagattagtggttgcctgaggccgggaaggagtaagtagggacgggactgctaataaggttggatttcttttttgggtgatgaaaatgttctggaattaaatggtagtgatagttgcatatctctgaatatactaaaaaccaccgaatactttgagttttatggtatgtgaagtgtcttgaacaaataatttgtatgcagaggggaaagggatcagctatttgtgacacccaggtgaaaatctgtctcgtgacagggaaggctagttgatgggctaccacataggtagaagtggcaaatattagtgcagagtcatagataagccagaggctggaagcaagaacctcagtgcatacagcggtgggacgactcagggaatcactggcgcaggtaaagctctcctggagaagaaagatggatgagggtgagaggcctgtgtgtgctgtgctggggtgacctccaccaggcgggttgagggggcctggtctggagcagcagctcaagctcagggccctactcactgagttggatgggagcccaggccagagcacctttgcagcgtagcattatggcagcatgacagatgtatcttgaagggaaatctgtggcttcatgagaaggctcatctgttgaaaggcaacattagttagagaaggattgcatttcctggacataacatactcatttcccaaataaattgtcagtgtgctcacctgagcagtggtcaccctggaccatggcgatggctcttgttgactcttgtgctggagcaggaggaggagcacactgctccagggagcctgttatccatggctcttggtctcccggccatttcggaggcttgacttcaaagccttcagtgctttgggagagtaagtcaccgtggcgatctcttgctgctgttgctatgcaattaaagatggaatgttcatcagatgaaacgcctgggaagtggtggcaggttttatttactttttaaatgaactttgtttgctttctttccttcctttcttcctttttctttctttttgatggagtctcgctctgtcgcccaggctggagtgcagtggtgcggtcttggcttgctgcaacctccatttcctgggttctagtgattctcctgtcagccttccaagtagcagcgattacaggcatgtgccaccatgccaggctaatttttttttttttttagtagagatggggttttgccatgttggccaggatggtctcgaactcctgacctcacgtgatccacccgccttggcctcccaaagtgctgggatttcaggcgtgagccactgcgcctgcccttgttacgatttttaaaagcttacctggttgtagtttaagcctcagatggtggttaccccagatattgcaagtgtcagctcttttggctgtttccagagaccagcctgtatttctgtgtccctgtctgtgttggtagggcatggagttgagtgtgggctgggtatccagttgtgggttgggaagctttgggggaaggaagataggttctttgaatacatacattagcttcattgttactaaaaccacccagattcagagagtagtggacacccaggatgttgattggctggtttgtaacgtgttttttcatgagaaacatcctttgggctactagggattgggcacatttgtgctgcttgccacctgatgtcttgagtcaccttttttgatcagacagttctcagtccatgggttagtgaaacaaataggctctcaagaatcttagtgtgggggttgttaactttcccgtgttggttttcagccgcctttgttgtatacacacatatcccaaacgccggaacaaggctctgtttccaagtgtgccgatgttgaattttgcattgggccctgaggtcactggtgggtgggggtgggtaggctgaagtggatagctgcaactcactaaacactcttttcctttgagggtcaaggtttgctaaataggggaaaactaagcttctttctcttttctttccagatggccttggtggtattggcatggggttaggaccaggagggcaacccattgatgccaatcacctgaataaaggcatcggaatgggaaacataggtcccgcaggtgagaatgacagtgcaccttgcttggtggtttggggaagtgaaaattattaattattgggacaactggactttgagtagtttaaatggaataaatatttaactgggacaaaattccctccttattcatctctgcctcattttgaataaaggcagtattttgtatttttatcaagttgagtcattttttaaaaagtcattatgctttttcattgtaacctgacaacaaccttctaagctgaaatagttgtgccatttgataagaggaggcaagccagagagttgatcttgctcaaggtcacactgtcagttactgacaggctgcaggtctcctgaccacgggaccatagcactgccgcagtgccctgaaaagtgtcttaccaagacccctttgggccctcctggtgtttgcacagctgctgctagagagctaggggcattgatagatgcaaaaaaggtggagaggccaggcacggtggctcacgcctgtaatcccagcactttgggaggccgaggtgggcggatcacaaggtcaggagtttgagaccatcctggccaacatggtgaaaccccatctctactaaaaataaaacaattagccgggcgtggtggcgcacgcctgtaatcccagttactcaagaggctgaggcaggagaattgcttgaacccgggaggcggaggttgcagtgagctgagatcacatgactgcacttcagcctggcaacagagcgagagtccgtctccagaaaaaaaaaaaaaaaaaaaacctgcatgaaagctttgatgtgtagaataaactcaggctttgctgtttagcattttcattgctgtgtaatgatgtattttgattctattaaggaatatgtcatttttatgaccttagactttggtctttgttggaatcctttgaaattggaatatggaagcccctctatcccaccattgtcagtgttgcatatccctagactctcttccagagtcaccctggggctgacttaaattctgggccacaacttcaaatggctgttaacgtttcccccgacccaaaacacacacaccccatgtctgacatctaaacagaaagactgggggttggggaggaagtcttggtgtttttaggaactggtttttattttgaagattttacctttaacagggattgatttattgagacggaattttgctcttgttgcccaggctggagtgcagtggctcaatctcagcttaccgcactcaatctctgcctcctgggttcaagtgattctcctgcctcagcctcccaagtagctgggattacaggcatgtgccaccacacccagctaattttttgtatttagtagagacagggtttcaccatgttggtcaggccgggctggaactcctgacctcaggtgatccacccgcctcggcttcctgaagtgctgggattacaggcgtgagtcaccacgcccacccttaacagggattcttaaaaaaaatctacttctgttccctaaaattttctaaaaagtttatgttccatagaatgtgtcttataattctatttcatgtttaatactgcctaacttgaggcctggtgtggtggcttatgcctgtaatcccagcaatttggaggccgagggtttgagactagtctaggcgacatagactccatctctacaaaatataaaaaaaatcagccaggtgtggtggcgtagtcccagctacttgggaggctgaggcaagaggatcacttgagcctgggatgttgaggctgtagggagctgtgaccatgccactgcattccagccccagtgacagaaggagaccctgtctcaaaaacaaaaaaaacacaaaaaccctgcccgactgggtcattaaagtatgtagatccctcagaaaaagattagccaggcgtggtagcaggcgcctgtaatctcagctagtcgggaggctgaggcaggagaattgcttgaacccgggaggtggaggttgcagtgagccaagattgtgccattgcattccagcctgggtgacagagcaatactgtgtttaaaaaaaaaaaaaatagctatatgatatttgacagttgaaatggtaagggctttttttcttgctgattaaaatatataaaatatacttgtcatcagggattttcttttgagttcttttgctggtttggaattatgctttttaagttcaaacgttatttactgctttgacataattttagtttgcattgactttttctttttaaggaatgggaatggaaggcataggatttggaataaataaaatgggaggtaagaaatttaaaatgaagtacaagcataatcacttttaggcatagttttctctctttcctcttttctttcttgtttaaaccctgcatgaaattctctttggtttcagtttgagtctagaaatgacttcctcctgcctgtccatccttccagcgggtgtcttggcttttggttctggctgtctcactaactagctctgtgaccttgggcagaccactccatctctatgcctctttttgcttgtctattcattgagggggttggatcagaccagctttttgaagatgggtgatttttaaacaagggtgctagcattttttttgtttttcaaaagcctttaaacttggtaagttcttggcagaagataccccagttgaaacatgtgatagaatttttctttccctgcttagtctaagcagtcttgttggatgatgctgaaatgtgaacctctcttgcaggaatggaggggccctttggtggtggtatggaaaacatgggtcgatttggatctgggatgaacatgggcaggataaatggtaagcatcgtgttttcttcctgctttcactcaccctttgccggctgttgcctctcaggtgacttttaggctgcagacccactgaataagtggtttctcacttctgcttttcaaccgaatcaaatgtcttttgaattgccttaaatatttcaaaaactagacataatagtagacttacttcacttggtcgctagtcttttgagatgtcctgtgttcccaagctctgcagtaattttcgagtacagtgttaaaaagcatgtacacgttcgtggttatggtctccgagtatgagggattctttaaagtttgtaatcaagtttgtctctgggagtgctgcaaagggttgttcttggtcatctgccccagctacaagttgtctatagaggcgttaataaaaatcacaggctcttttaatttagcatttacataatgcaaattctggtttagtataattcaaatcctccaccaacttttttttttttttttttgagacagggtctcactctgtcacctaggctggagtgcaatggtgcgatcttggctcactgcaacctccgcctcccaggttcaagtgattctcctgccccagcctcctgagtagctggtattacaggtgtgtgccaccatgcctggataatttttatatgtttagtagagtcggagtttcaccatgttggccaggctggcctcgaactcctgacttcatgtgatccgcccgcctcagcctcccaaagtgctgggattacaggcgtgagccaccgtgctcggcacctgcccccaactttttagcagaaatataataatataataacaatgtagtatttcatttagtccttgtgagaaccacatgatatgtacatactgctatccttgtttcatctgaaactgaggcacagagagtgacatgcctaggtcaagtgactggtaaacagtggtgcctgcatgtgaacccaggctgtctggctccagagcctggcacttcatcatgtgggaatcctgccttttagaagtgcctccagcacagcacttggcccagggcaccagcagggctgtagagtgtgcatgagaaattgtaaattttcctttttgaaatcctttatgtgttggtgactctttgaccttccccttcactgcaggaaagctgctgcttttttacacagaaactttcttggactgagaagtcattagggatttaggtataaaccttcctttgcgggtctgccataacaaaggatgtgaaaatggtacaaggacagacatcattgtcaggcttgaaaggcggctgtccctgatgatcaggcccttcttccggtgcacagggagcagtggggcatgatgtgtgttgccctcttcatgggtgccttgttctagaagctggtaaaaggatgtaggaaagttgtcaccattagtaataaagcaacagaggtctgcgtttccagtgtacattcaagcttgcctgtaacttgtgtgtgcatgggattttaatttttaaaaaaagtttcagaaatctggcttggtaaaatgttactcagagcagattagtctgggtgtgctggctcacgcctgtaatcccaacactttgggaggctggggtaagaggattgcttgagctcaggagttcaagatcagcctaggcaacactgcgaaaccccatctctctcttttttttttttttttttttttttaagaacagattagtcattagggaatttgagttgttgctgtgaggagtagagtgatgcagtttagaagtagatggaaatcaggatgggttggcctgggagctgtgctgagccgtgtgacacagtcgatggtgaactggcaggtgtaatctcgcagtcaggattcagagcctggggtacgcggtggcaaaggattccaagtgctgattctctggagaaccacaaatggagtgtgttttcctagactgttcttagatgttctgagatacggcactcggagtgctccccacaccctctacagctgagaacagggactccttcccacttgaccagcattctttggtttgggtgggatgagctctagagcccttgggcactgcaaggaaactgtacatcacactggaggaagaattgaagcagacgtttgggtttaatgaaatgttaattcatgactagagtgtagccattatggtcatgggtgctcccatcagactgctggtcatgcaggttcccaggacccacactcagcatgagtcaaatcttgatagagtggctataaaaatgtaaatcaaaagattgttaaatgtcggccaggcgcggtggctcacacctgtaatcccagcgcattgagattaatgttaaaaaaaaaaaaagagagattgttaaatgtcaaaaactgactgtagtgaggcagtgtttgacagtgaaaatgctaccctttgtgggtgtaaattggagttcacggtgctccctgagctctggggccctgttgacagccagtaagatgagttatgaggtccttgccaacatgctgatgccagcctgtggcatgcttgtctggagtggggtgctgccttcttgcagacaggtggcaggatggaaggagagcagcagaactccatgaggatgccgctgcggggctgcagggttctgtccctgccgccgtcccccccaccctcccaccaccaccgactcctgggctctgctatccagcagatagcacccatgaggagcatgctgacccatgaggtcacttgggttaattcaaactaggaatgttaagcccaccattggcagccagtccttgttaattcataatgtgctgctgctgccacatctctaatggaattgcttattttattgaaagatagggactctggctgtataatgcaaggtgttcattacatcgcacctatcttacctgacatttctaaggagtgagatgattaataactagattcttcaaggccctctcagcatgggagggagagattcttcaaggacctcgcagcatgaaaagtgtgatccccatttcagcctgcgtgagatggatgcacaaggaaagaagtggccagcagtaggaatcacgaaaggcttatcaagcaagtgaccactgtggtgggcctttcccggcagaagctaggacctttgttttaaaagacattgtaaggctgggtgtagtggctcacacctgttatcccaacactttgggaggctgaggcaggaggatcacttgagctcaggagttcaagaccagccagggcaacatagtgagacctcctctctacaaaaaataaaattagccgggcatgatgccgtacacctgtgctagctgcctgggaaactcaggtgggaggatgacttgagcccaggaggtcgaggctgcagtgaagcatgatcacgccactgcattccagcttgggagcttgggttgacagagtgaaaccctgtctcaaaaaaaaaaaaaaaaaaaaaaaaaaaaaaaaagaaccttacaaaatatgagaaagttgtgacccaaaccccgttatgtagatgcagccactgcagttgtcagcagagaggtctttctgtgcagacatacgtctcgccatgcacacgcatttctgtgttagggcacaggcttctgtattagaggatgggcttctgcactggatttgagtcccagcctttgcctcacctctcaccagcatgtgaccttggtcaagttactaaattgtgtgagcctcaatttctttttaaagtggtagtggtggtggagggtaacaggcgtgcgtggcatggttgtgaagagttgatggaattatacacaaagcctttggggtagggcatgtgttgagtgcctagtaggtgttaccttctgcagcctacgtttgatttagctgcactgcaggggacctcttggttactgtggtagcgaatgcttggtgtacccagtattgtggtttgtgtggctgtaatggaagttgttcattggtccttgatggacttatgttaggtaggttgttcagggattcagttgcagtgactttgttttttagggaatgaagaatgaataatggtttcctgcagaagagttaaacatgctgacttggtggtggctgtcgtgtgtatacattttgttttgtttttgatgtctcagacacagtggtattcctggaaaggcctagggtgatttttccacagagatggagcgtggcatgggtggaggacttgaaagagactttgccaggaaggagatggggatatctcgaagctttggagagcctcttggcagaggaatgagtaagaaggcccagtgggcctcagtggctggggtccgccctctggggtgcaggctgccagggtttacctgatgtccctgctctcttagagtcagctggttttttttaagcttttaaaaaagatgttgttttagacctaggtaaaaaatttaggtcttttagtgttttattgctatatcagtagcattatttgtctttaagtcttttcagatggctttttaaaaaattggcataaggttgtgcaggctgtgggaatggaaactgctgcgtgtacttgactttctggccccctaggcctggagagtgtttcatggccctctggctccctaggcctggagcgtgtttcaaagccctgctaattggggcaggagtttccttaccccagggtgctgtggtgtccagtccagttagcaggatggagtgagttgtgcacttgctgatgcctttgacagaggcatctagaccgactagagaggttttctaaagttggaaggtcttgagtatttaggcctatccgtatgcagagaaattattttttcagttttggttaggtggcagagcaatttcctcctcttttttctttctttcttttttttttttttttttttttttcaagacagagtctcgctttgttgcccaggctggagtgcaatggtgcgatctcagctcactgcggcctccacctcccggtttcaagtggttctcctgcttcagactcttgagtagctggcactgccgccaccacacccagctaattttcttgtatttttaatgagatagggtttcactgtgttggccaggctggtcttgagtcctgacctcaagtgatccacctgcctctgcctcccaaagtgctaggattacaggtgtgagccatcacgccaggtctgttgatgtccattttatgttagctgtattcttcaaatttatgaaggccctagaaaggtggtcattagattcatccttcagctcatcagaggggcaagattcttttttaatacagtctctccctgtcatctgggctggagtacagtgggtatgatctcactgtagcaggctgaagcaatcctcctacctttgcctctgagtggctaggaacacaggcacatgccaccatgcccagctaatttatttttttgtagagacagagtgtatgttgcccaggcttattacaaattcctgggctcaagtgatcctcccgccttggcctcccaaggtgctggggttataggcaacagccactatgcctggccagcggtgtatttaaaaaaaaaaaaaaaaattttttttttttttttttttgcgacagagtctcgctctattgcccaggctggagtgcagtggcacaatcttggctcactgaaagctctgcccctccaggtttaagctgttctctgcctcagcctccagagtagctgggattacaggcgcgtgcccccatgtccggctaattttttgtatttttgtagagatggggtttcaccatcttggccaggctggtcttgaactcgggacctcgtgattcacacgcctcggcctcccaaagtgctgggattacaggcatgagccaccgcacccggccaaagaaatattttaaaacttactggccgggcgcggtggctcatgcctgtattcccagcactttgggaggccgaggctggtgaatcacgaggttaggagttcaagaccagcctggccaatgtggtgaaaccccgtctctactaaaaatacaaaaattagccgggcatggtggcgggtgcctgtaatcccagctacttgggaggcggaggttgcagtgagccgaggtcaaaccactgcactccagcctgggtgacagagtgagactccatctcaaaaaaaaaaaaaaaaattaaaacttactgtcatttgcctgcaaatactaatttgtggatagctatggcaagaatagatggcatgtggctgggcaggtggattacaaggttaggagtttgagaccagcctggccaacatggtgaaaccccgtctctactacaaacacaaaaaatttagccgggcgtggtggtgcatgctgtaatcccagctattcaggtggctgaggcagaattgcttgaacctgggaggtagaggttgcagtgagccgagatgacaccactgcactctagcctgggcgacagagtgagactctgtctcaaaattaaaaaaaaaaaaaaggcatctttacttctgtaggaactttttcttgctaagagccttcagcttcttgccactctgcagcacctctcgcctaattccgctttttggagtggcacatgagtggcacagagaggtggatgtgggcttcttgcctttgaggtcacttcatgtggccacaggaaactgttcctgtcctgaccggcagggcgccacctctcccgctgcggttacaccttctttctgattgggactgtgcgatctctgtcccggaattccctcctgccgctgtgatcagacctacatgagtaaggtgatctcgtcaggttctcagagtggttgggttggtttttcaagattcaattcttgacctctttcccgtgtcctttgccatgagaggtgaaccattgtggtgctcctttccatagtgctttcctactcggtgccccttcctgtgcctaggcagtagatctttgcactcctttgtgcaaacagctgtacttgctgcttcaaaaatttggataggcctgtggtctttggccttcaaggatgaggtgtagctgaggcgatactaagggtggcttgggacatcgccagaggtctgtgcatccaagtggcctagtgaggacgctggtggagacgttggttgccagatgctgctcagggcattggctctgctagggggctcagcaggcttggcacaggcagcaggtgtgcgcagatagagcggctggcggcggtgggtgcaggtctctgtgaggcaggggaggagcatgggcagaacaggctccagttgtggtctgtggggaggcctgtgaatgccgatgggagaattccgccattctctgcaaatcagtggcatgttggttgaaagcttttgcagctgtcttgcaggtgtgttagttggaagcttgatctagttcaggggtgtgcacgggagaatatagtcatgggttctcagttggtttctgtttgggtcagtaaagccccttatccctcttttccacttattactagagacagaaacttaaaaaccatggtttcaggctgccaaaaagcctaaaacagaacaaagcaaagtaagacgtgttggacaagcttggtctaggtgctggaaagccagcctcggctcaggcatgccgggcaggatcgcaggcgtcccgggagaatgagctgtacctgctggtagactgaagtctgtgtctcttggtgaactttcccaccttgtcccacagcagttagttgggatataagaagcagctgtgtggggtgcaggtgcttttgttgttgttgttgtttggtgtctttttttttttttttttttttcttagagacagagtctcactcttgcccaggctggggtgcagtggcacgatctcggctcactgcaacctctgcctccagggttcaagcgattctcccgcctcagcctcctgagtaactgggattacaggcacctgccatcatacccggctaatttttagtagagacggggtttcaccatgttggccaggctgatcctgacctcaggtgatccacccgccttggcctcccaaagtgctgggattacaggcatgagctactgcgcggccgggggacaggttttaatggctttgtggccgtggtcataaagcgaaatgtgcctcgtggctaatgtccaagttgctgagcatatactttgagaccagagcgggtgggtacaagtgtcttctacatagcaaaagatggaccagaagcttggaaaggtaatgctatgatagcatcagacaaaccttaaagaggtgtgggtgcaccgtgggcaagtgagcagcagcactgtgtttgggatacttggtggggggtgcaatttaggtattttcctgaaaccttatctgttgcctagtcacagcacacccagctcatttcaggcaaggctggcatgctcaaggatttccgcgcagagctcatttgttagcgttgaggttgtccgtggagctgcagctttaatttgctctatgataatgagaggtgcctctgggtggataaatgtgggctccaagtgggtgatgctgggcggtcttctgaacaagaagttggctggggtgggggtgggggcttactttccagctcaggggaggcaaggaagcctcagtcctgagagcctggaccagctttagaaaactgccgctgagcgagacccgatggccctcttcttgctctggctctcagttcatgaatgcatatgactcctatctctgctgggcgcattcgcaggtgaccccgcacgctgggcctcagactctggagctacgtggggtcttggcatcgtgacccagcatcaaggactctcctagttctctgtaaaatgatcttgtctgtgcgtgtgtttctcaaacccctttccctttatcttgtcatttttattagtagtatttctactctggaatctgtaatgagcacatttctattgccatagaggaatttggctaatttttttttcttcctgatttccttagaaatcctaagtaatgcactgaagagaggagagatcattgcaaagcagggaggaggtaggaaccgcttagtttgatgttttgtttttttagaacaggctgttatcgctggggactgtagagcttagtggtgagaagtgcgggttctgacacagactgcccggggtgggagcagctctgcctttttctagctgtgtgacgtttggcaagtcactgaacctctctgtttctcatagcactcatttgtaaaatgggggtgtaatagtacctgcctcagggatgctgtggagagtgaatgcatgtgaaagagtgcttccgcacgtgctgtgcacaggccgaccatcttcattgttagagtacctctcttttgggggttttgttttccacattataaattcctaaaagtaaatatattttccttagacttgatgataagactgaaagcacaccacccaacaagtaataaatgcttgtaaaatagataaatgtactcattaggaaaatatgaagaaagtatggtctgaaaccccatcgcccagtgatgactgccggaaacattttgttctgaatctttcattcatacacagctttatggatactgagaacaaaatgtactttttgagcatttttggagacagtctcgctctgtctcccaggctggagtgccgtggtgcagtctctgctcactgcggcctcaacttcccaggcctaagcgattctcccactttagcctcccaagtagctgggactacaggcgtgtgccacctggtttggctaattttttgattttttttgtagagatggcattttgacatgttacccaggcttatctcaaactcctggcctcaagtgacctgcatacctccagagtgctgggatgacagatgtgagccaccacacctggcccaaatgtactttttcagcctgattttccctctgagtatcttggcatctcacctcctgacttctgtgttgggctggctctggagctccacgctggtaccatttcctcccatttctttttttttttttttttttgagagacggagtctcactctgtcgcccaggctagagtgcagtggcacgatctcggctcactgtgacctccgtctcctgggttcaagcgattctcctgcctcagcctcccaagtagctgggactacgggcgcacgccaccatacccagctaatttttgcaattttagtagagatggggtttcaccatgttggccaggctggtcgcgaactcctgaccttgttccgcccgccttggcctcccaaagtactgggattacaggcatgagccaccacacccagctgccccacctcatttctgatgcctttgggcaaagtgcccattctcgctaggttccttatactgtggggaagttctgagacgtctcccctctgaaagtcacacattcttagagtcgggcctgctttggccgctcactgtgtgctgtgcagctagagaagcaggcgcggtgtggccagttacagagccagttagagaaactgcccagtttcctcttgaattggtatctttgactaggctgcttgggtcggtcacaggctggctctgggctgatggccactctcagaggcaagcgacagggtttcggggaggagccccaaactcggcatgtggaaaggggtggccttgctgacggagccagaccctgctttccagagttgcaagcaccacgggtgggggcgtcccttcgttctgctgactgacccccagccgctaccagagcccactctgcagtgccatcaacatcttctttccaaagccagcaagtcatttggtttccctgacaatagggtccccaaaagtggccagctgtgtgcatttgtacacagaggatctctcggtgtgtgtttttttgacctctgcttgatggtgtggccgaaaatcctttctctgtgccctgggagcgctgaggaaatgcagccagagtggcccccagcagagcatcctagagggacaggctgggaggggaaggtgggagtgactccgacttgtctccacataactcctgttcattaccctgggtggccccccgagtggggggtgtccatgcctccccctggagcatttctcagtgtctgctgatggagaaacctcagatgtctcaggaattgacgtccatggttcacaaagcttgtcacagacactagcacctcacagacacacatacaggggtgttctttagaagttgtgttatggaaatctcagctgtggcatagagcagagagaatgctgggaggcccccatgtgcccaccacacagctgtagctgttgtcaacatttgaggggtgtcttaatggtaaattatggtgggcctttacccctgatccatgcccatgagctgaagtggtctggcgtgttgtgcacacgcacactcaagttcttgacacccacctgtgttttgtgtccctgtttcaggtggaggtggaggaagcgtccctgggatcgagaggatgggtcctggcattgaccgcctcgggggtgccggcatggagcgcatgggcgcgggcctgggccacggcatggatcgcgtgggctccgagatcgagcgcatgggcctggtcatggaccgcatgggctccgtggagcgcatgggctccggcattgagcgcatgggcccgctgggcctcgaccacatggcctccagcattgagcgcatgggccagaccatggagcgcattggctctggcgtggagcgcatgggtgccggcatgggcttcggccttgagcgcatggccgctcccatcgaccgtgtgggccagaccattgagcgcatgggctctggcgtggagcgcatgggccctgccatcgagcgcatgggcctgagcatggagcgcatggtgcccgcaggtatgggagctggcctggagcgcatgggccccgtgatggatcgcatggccaccggcctggagcgcatgggcgccaacaatctggagcggatgggcctggagcgcatgggcgccaacagcctcgagcgcatgggcctggagcgcatgggtgccaacagcctcgagcgcatgggccctgccatgggcccggccctgggcgctggcattgagcgcatgggcctggccatgggtggcggtggcggtgccagctttgaccgtgccatcgagatggagcgtggcaacttcggaggaagcttcgcaggttcctttggtggagctggaggccatgctcctggggtggccaggaaggcctgccagatatttgtgagaaatgtaagtggctcttggggaacttcttggtggtggtgagcatgaggggacaggggaggcaaagatcagcaggatgaagtcagaggtggcgcccttcaaaggggaccacacctccttgccactgtcccaaacgttttatgctagtgggacaagtaaggaatgtgagaactgtgggttctggaagagcctgggcttctccactgtgctagaatatggagcagacgctgagctcagagactccagtttctgattggttggcttgaagaggcactatgtgttgcacgatggtccagggaaagaagtggctgtaacggaattattttccccagctcagccacccttagccactatttagtgactgtgggctgcgcaccgcaggcctgagtgtcccatcctgcacggtgctcccacaggcagagccccagggagggagctggctgtgccgcttcacagccttgtcccacatgtatctattagtttcctgctgatcgcctcagtctgaagggcagccagcttctcggtatagtgagaaatctagcatggccctcagagccagctgcaaggcatgccttaggatttggtttaatcacgcatcagtctcccttttcttctccccttcagctgccattcgatttcacatggaagatgctaaaggacaaattcaacgagtgcggtaagtgttgggaacggctttgtaggtgcttccctcgtgcttgttggtgacgcagccgagtcagcagcaaaacctccctcccagccccctccgtcggctcaggacccatggccttgccatgttctgcccacgccaatgctcaggcaggttgttgagtgtcctgtgatgtgtcacatgtttttcagctgtgttctcatttcatccttacttccttttttctttttgagtctttgaaacaaggtagtagtgtccccatttcacagatgagtcaggcagagtcttccttctgaggttacctggcttctaggtggcaaggctaaataaatacatcccagacgaggtcgctttcccctcagcacagctggtgtggggcctcggagagaacacagcccagcaggtgccatggggaggcggtgcaggctctgggcacacagcagctcctgtgagggtgaggctaaggtcttgtggtttcctggcacatcgggcaactcttctggagggctctgtctgtggctgaaagcaagttgtcttccttccctgccctccagggtgagcccccaccccgcatgcaccacctctgttctttttagctagaggggcctgagctagaggtctgggcagctgcttccgcactgtcctcccgcttcctgtttcagcagtggctccgatttcaccaccattgctgcttctccatggttcttggggcaagccgttgagtcatgatctgcctctttgctccattcttcacctctttccccactcctgagttcccatgttgtagctagatattctgaaaaggccagtgggatcacagcgcccccagcccccacttttgcaatgcctggagcggccctgtgccttcaagaggaagtccagactcacaagccccttgaagacctggtcctatcctcctccatctccctcctgtcccagaacctgagcggcaagtgctgcacgtgtcccgcaatgctctcgtgtgagccaattactggcaagtcttctttctggtgaatttctgtgtaagctcactcagaacttgcccctgaggacccctccaccctacctgccctgggccctctcttaggcactgagttcccacctctggcattgtggccctaccacctttggtactcctggagtagagcctttgccctctagggctctgtccacggcgttgacacatatctggatgcttaacgggtgctcaaatgaataagtgaaacctgctggctttcatttggacagtacagacgtgtccattggattgcggatggctttgtaaccaggggcggtggcatatcaaaaatgaagactttgtaaaatgtatgggaactttctgcctataaagctggctttacactgcgccttcttttttgaacttcctgaagcgtaaaggcgtgcattgaatccgccaggaaggcttttcatggggcaggggcaggctctgttagcagaagaatggcagtgtggctgagggggccgtagtcattggttctcgccattgtattctgagcctttgtgctctaggcttcagggcctctcctttttgactctgtccaccaaaatctaacaaaatcgggactgagtgtcgtctcttcttccctccctgtcctaggccacgtgctgtacgccgacatcaagatggagaatgggaagtccaaggggtgtggcgtggttaagttcgagtcgccagaggtggccgagagagcctgccggatgatgaatggcatgaagctgagtggccgagagattgacgttcgaattgatagaaacgcttaagcagttgccttttttaaacatcgatacgagacctctgaatttgtattttttcttgttaaccattttaatttgttggctggatgtataaagatgtttaaaaaattcagttgctttttggggtaatttgaattacttttttaatgactggggttccatttgactgtttgcattgagattgcaatgtgcgcaattttttttgtagttgtggcatcttgttgacatcgaatatgactttgataataaataccggttcctgaaaacggcctgcttgtgtgtgctgtgtgggcaaccacgcgaggtgtggggagctggggtcactcgagcttccagtccaagcagcagggatctcatcccctctcttgcttgtctgaggccccaggggtgggtgcctgcccacagatggggggagactcttccctggaaactgccttcctgtgggctgtaatcccccggcttacaatggagcgtttggctgtttagagccttctgaggccaggcgcggtggttcatggctgtagtcccagctactcaggaggctgaggcaggagaatcactcgaacccaggaggcggaggttgcagtgagtgagatcgcgccactgcactccagcctgggcaacagagcaagactccgtctcaaaaaaaaaaaaaaaaaagccccccgaaagccatcctgtctccctgttgtgaagttaacgccctggggcacaggccctgcctgagtcaggcttgttctctggctttttttttttcctgctgaaacagaccaaactgtgtgccaccttccatgcgtgttcagtcctgccagaggctcaggccaaatctgattgatacctgggctctgtcagaattgggtataggccccaccccttcccccagtgaagcgctctcaggatccactcaggccaagcaggtgtgcatacctggcaaggaggcctggctgctgctgttctgttggctgtggaggggcgcgtcctgcccggctgcctgcctggtagcacatgctgttctgatcacccggagccccccttgctcaccagcttcttgccacccttttctccccactggcttttatccctgaggggtgagaccatggcagggtgaccccagacacacccccttttgtgtttggtcagggggttcccgtgcctttgctccactgtgtgccaatcaggagggaaagaaaagacaagaagcagggactgctttaaactggggctttatgtggccaggtacaagcccaggcagctctgtgactttcccgcgccgggatccagggctcctgggtgagcgggcgctgggctggctggctgtcctggccccacgcctaccggtcttaccgtcccagggggagtggttggttttccaggggatctgccgaggaagcgtgacttccatggacccctctccccagaagcccaatagtgagcagcgcccccggggaatcgccagggtccctccagccctcccagagtgtccacgtaccgcagaagtcgacatcatcgtacacctccgtctccctggcagagcacagttgggtcagcaaggggcaccgtggcccattccccccaccctgcaccacacaccccgcactcccccaccacggtcagggctggcactcacaggggcaggagcgctgttctgggcacgtagccatctgtggagagagtgggcatggtgggttctgaggcccagggtggcggcggggacctcccggggctgcggggccgggcgcactcacatttgcctttggggtcccggcacagcatctcctcattgctggtgaactcgatcacctccaggatctccccgcgccggatcccgaggtgcttgccacccccgcgacgtgtcttagcgttggggtcgatcatcatcttcgtgtgaaccacgatctccccttcaaactggggcgcgagatgttagggcctctgcttgtgctgccgcccttgggcccctgtcttctttctgagcctgggatcggtgggaccctggtctccgccctgccaggactcctgcttagctcagaggcctcaccttgaacttcttccggaactccctctcggccttctctgccttcctcagctgcttcagcaactttgggtccatgggtggcaactgctgtggctggggatccttctccttcctgatagcccccaccaaggaattgtgtgctcgtgagcaagttgtgctcctctgggggttcctggagctcgccccccgtctgcccaccccctctgcccatggcacctgagcgctgggtcttgtggtggcctcctggcggcttgctgaactgagggcgcttcatctggggacagtcaggactccgagtcaaggcagggcccgccggctcagcctttaccctggtagctgttttttgtttgtttttgtgtttttgttttgagacgaagtcttgctctgtcacccaggctggagtgcaatggcacaatctcggctcactgcaaccttcgcctcctgggttcaagcgattctcctacctcaggctcccgagtagctgggattacaggtgtccatcaccacacctggctgatttttgtatttttaacacagacaggtttcaccatgtgggccaggctggtcttgaactcctgacctcaggcaatccactcgcctcggcctcctaaagtgctgggattacaggcgtgagccactgcgcctggcaggtggctggatcttgagtaaggcctccctgtgtcagttctgaggactccccaaatcccaccaggtcccctcccaaacctctccctgcccaccttcttccgcaagcctttctcaggggtcatgggttcttctggattgccttccattcccttaactcctgccacgtgctcagcatggtgggaactgctgggccacgcccctcatggcagccctctcagcaaccttgttcatgccagtagacgccactgtcatgcccaacttgtccacaaggaaataaaggctcagagaggtcaagcaaactgcccaaggtcacccagctggtaaatggtaaaggcaggatttatctgtaggcttcgaggccatttcacttctgcctcctagagcaagttgggtctagggttcttttttattttttgagacggagttttgctcttgttgcccaggctagagtgtgcaatggcgcgatctcagctcactgcaacctccacctcctgggttcaagcgattctcctccctcaacctcccaagtaggtgggattacaggcacatgccaccacacccggctaatttttttttttatttttagtagagacgggtttcaccatgttggccaggctggtctcaaactcctgacctcaggtgatccacccgcctcggcctcccaaagtgctgggattataggcgtgagccaccgtgcctagccgtttttttttttgtttcttttgtttttgtttttgtttttgagacggagtttcattcttgttgcccaggctggagtgcaatggcatgatctcagctcactgcaacctctgcctcctgggttcaagcgattctcctgcctcagcatcctgagtagctgggattataagcacccactgccacacccagctgatttttgtatttttagtacagatgaggtttcgtcatgttggccaggctggtctctaactcctgacctcaggtgatgcccctgcctcagcctcccaaagtgctgggattacaggcctgagccactgcacccggtaggttctggggttctactgtaatgagatttgggtgaaaaactaaggcagaagggaggatgaggagaggctggcccatgggtacaaagttacagttaggaagaagaaattgggtgttccattgcacaggagggcaatgatagttgacagtaaaatatcatggccaggcatggtggctcatgcctgtcatcccagcactttgggaggccaagtcgggcagatcacttgaggtcaggagtttgacagcagcctggccaacatggtgaaaccctgtctctactaaaaatacaaaaattagacgggtgtggtggtgggcgcccataatgccagctactcaggaggctgaggcaggagaatcgccggaacctgggagctggaggttgcagtgagtcaagatggcgccgctgcactccagcctgggcgacagaccaggaccctgtctcaaaatagtaaataaaaataatttttaaaagatgctgctagggtaagcgtcctggactggtgactgatgatgagactctggactgaggggtctcccatggtgccagtctccctgtgccacttcctggcaaatgaccaggctcccaagtcagagccctgctggccaaggaattggcttcaggtgggagccccaggaaccctggtgagtgaaagatccagaacccagagccccagcatgtcctttccgaatggctcaaagtatcccgccggacatttcaggcctgtagtccctccaagcagcccaaggagcagcacctgaatcgtgcccgccagataccaggcatggccatccacagtctcacctggaacacacagcccctccagctgctcctgcctctcagaggcttccctggccgtgagcagtcactccaccaggagcgaacctgaccttggcactccagggtccctgcaaacccgccacattagagcacctcttggcaccgccatgcaggcagccctggttcatccacagctgacccagagcaggcctctgcccgccttccccgcatggccagctcagatccctgggaaaggctgggctctccccacctgcagaggagccccctgccttccaggaacctctgcagtggagctgccactgctccaagtaaggcagacagtgggaaaggggagtccagagtcctggccccaagagacctaagctgcctttgagaagctgcacccacagtgagaagcccacgccactcctgagaagcgggagatccagggaagtgggacctttttttttttctttttttcttgagacagggtctcgttctgttgcccaggctggagtgcagaggtgcaatctcggctcattgcagcctccatctcctggattcaagcgatcctcccacctcagcctccccagaagctgggactacaggtgtgcaacaccatgtccaactaatttttgtatttttagtagagacggggtttcaccatgttggccaggctggtctcgaactcccaacctcaactgatccgcctgcctccacctcccaaagaactgggattttaggcatgagccaccgcgcccggccccttttttcttttttcctatcagaacctcaaatgactggcaaggaagggggagaaggttatttggtgacaggaacaatgggccaagggtggggactgtatgaagtttgaggagaggcagatgctcctagcctcggaagaggtgggggattccagcagggcttctgggagtggttggaggcaggctgtcactagcccaggcgctcagcagccccactcctggccatccgcatccccaacggtggcccccagacccaagccacagagcctcccctagagcggaagcagaaggggccccaccaggaagctgtgtgctcacagggaggtgttgcaagaagctcagggagaaagcccaggagaagcagagggggcctctctgccccaggccctctgaggctgtcagcgagagcaggagcaccttagaagctcaagctctggcccccgctgaaagccctgccacagatccagctcgtggaccagctgtgcaagccagggcaagccccatcccagagcctcaaccttgcgtacctatttttttttctttttttttttttgagatggagtctcactctgtcacccaggctggagtgcaatggcaggatctcagcttactgcaacccctgcctcccaggttcaagcgattctcctgcctcagcctcccaagtagctgggattacaggcgcctgctaccacacccagctaattttttgtatttttagtagagacaggttttcactatgttggccaggctggtcttgaactcttgacatcaggcaatccacccgccttggcctcccaaagtgctgggattacaggcgtgagccactgcgcctggccttttttttttttttcaactgagacagacacagagtctcactctgtcacccaggctggagtgcagcggcgcgatgtcagctcactgcaacctccacctcccgggttcaaggaattctcccacctcagccttccgaatagctgggatgacaggtgcatgccaccatgcccgactcatttttttttttgagattgagtctcactctgtcgcccaagctggagtccaatggcgtgatcttggctcactgcaacccttccttcccaggttcacgcgattctcctgcctcagcttctctagtagctgggactacaggcacgcaccaccacacctggcgaatttttgtatttttagtagagatggggtttctccatgttgttcaggctggtctcgaactcctgacctcaggtgatccacccgcctcggcctcccaaagtgctgggattacaggcgtgagccaccacgcccggccccagctagtttttttatttttagtagagatgggtttttgccatgcgggccaggctggtctggaactcctgacctcaagtgatccgcccaccggacctcccaaactgctgggatgacaggtgtgagctgccacgccgggccagccttgtgcatctgtaaaatgggggtgcattgccttactgccctgtggggatttgggagtggagggtacggatttagggacaggcaggcaaggtgcttgcctggaagctgcttgtgttttcatgaaggcattaactttggagtggagggtacggatttaaggacggatttaaggacagatttagggacatgcagggagtggagcgtacagatttagggacaggcaggcaaggtgcttccctggaagctgcttgtgttttcatgaaggcattaactttggagtggagggtacggatttaaggacagatttagggacatgcagggagtggagggtacagatttagggacaggcaggcaaggtgcttgcctggaagctgcttgtgttttcatgaaggcattaactgtggagctgggcaggaggtgcgggcctgctccctattcacccagcacaaacttctaagaaacctttggcagcctccctcccctgccactgccacacctgcctgcaggccacacctccccctgagtttcaggcccaagttctgcctggacatcccctcagctaccttgaacacaacaggtctaagtaaatcaggctgggcgtggtggctcacgcctgaaatctcagcactttggtaggctgaggtgggcggatcacgaggtcaggagttcaaggccagcctggccaatgtagtgaaaccccagctctactaaaaatacaaaaattaactaggcatggtggtgggcgcctgtaatcccagctacttgggaggctgaggcaggagaatcgcttgaatccaagaggcagaggttgcagtgagctgagatggcaccactacactccagcctgggcgataacagagcgagactgtgtctccaaaaaaataaaaaataaaaatataaggccgggcgcggtggctcatgactgtaatcccagcacttgtggaggctaaggtgggtggatcgtttgaggtcaggagcttgagaccagcctagccaacatggtgaaaccccatatctactaaaaatacaaaaagtagctgggcttggtggcacgtgcctgtaatcccagctactccagagggtgggacaggagaatcgcttgaacacggaaggcagaggttgcagttagccaagatcacggcactgcactccagtctgggcaacagagcgagcctccatctcaaacaaaaaaacgaatacataaataaataagggtcaggcgtggtggctcacgcctgtaatcccagcactttgggaggccaaggcaggtggatcacgaggtcaggagatcgagaccacggtgaaaccccatctctactaaaaatacaaaaaaattagctgggcgcggtggtgggtgcctgtagtcccagctactggggaggctgaggcaggagaatggcatgaacccgggaggcggagcttgcagtgagctgagattgctccactgcactacagcctgggtgacagagcgagactccatctcaaaaaataaataaataaatgaatggatggatggatggatggatgaatgaatggaacctaacatcttgtcgtcaacccaggggcggctctgtcatgcccttgggtgctaggcttgaaacttccctgctttatataccaccaaatcctgctttttttttttttttttttgagacagggtgtttgctgcccaggctggagtacagtggtggagtcacagcctcactgcagtctgcagtctcgacctcctggactcaagcaatcctcttgtctcagcatcccaaatagctgggactacagatgcttgtcacacctggctgatttttaagtttttttgtagagatgaggtctcgctctgtggcccagactggtctggaatcttgggcttacgggatcctcctgtcttggcctcacaaagccctgggattggctcaaacgatcctcctgcctcgggctcccaaagctctgggattacaggcatgagccactgcacccggcctgatgcctgcttttgattactgaattcacccactgctcccacatctcctgctgccaacctgggccacacctctgcctacaacagccttctcactggtccttcgcctctgggctccccttatgtagttccacccagcaggagccagcaggtcctaaaatgttacttgctcttacaccaggagcatggcagaaaatggccttgccccgaatgttttgcagggactcgggcaggccaccaacaaacctctgcccttggggctggggctggagtcatctctgggttccacatcgtcatacagctcgtagatctcatctgggaccctgcggggatacctgagatgaggcctcttctttttttttttttttttttttttttgagacggagtttttctctgttgcccaggctggagtggtgcaggggcatgatctcgggctcactgcagcctccacctcccgggttcaagcgattctcctgcctcagcctcccaagtagctgggattacaggtgccccccaccacaccgggctaatttttgtatttttagtagacggggtttcaccacgttggccaggctgttgtcgaactcctgacttcaggagatccgcccacttcagcctcccgaagttctgggagctccaggccgagatgaggcctctttgagccccacaatccgcacccacctccgcttcctccccacactcactgcgggatgtcttcaggctgtcggtcctggaagtggagcccagcggccgagcgggtcctccgtagatctgtggggtagagagtagggcagggaagccggcactgcctgggacctcagcccccgctcctgccggtgccgcccgccctcacccacctatggatgctgcagagggtctccgaaagctctgcatatccacgggccccgggggcagcgggggcttggctggagggtgtcccaggctgctggcagggggcagaggcctccgccggggtggatggctgggtctgaggcctggcctggcccctccactgtgaaccaggcctcctgacctccagcggggtgtcccagccgctccaaacccagggctgagcgggtgccgggagctgaagccggccacggccgcaggcagtgagctctcggaagcggagctggggagtggaggctttcgagggagatcaccgaagaactcaggctgcgggtgtctcttgaggacagcgctgggctcaggctgtgagaacttgcggggtggcccccggcgctccggctgcagcagcttcctggggagtgagttgaactcgggctctgaggaggtcctggggaggccgcccagctcgggctgcgggggcttcttggagagcgctttgaattcggccggccgcggcctcttgggaagcacgctgacttcgggctctgaggaggtcctggtgaggtccccaagctcaggctgcggaggcttcttgggaaagtcactcagcggaggctgggaggcctttttgggaaaggcgctggagtcgcgcttcggctcgctggactgaggcttccagaggggagtctgagcggcctcgctgaactcaggctgcggcacggacttcttagggaggccaccgacctgaggctgcggaggctttttggggtacacgttgaactcaggctgcgcaggcttcttgggaaaggtactcaactcaggctgcggggacctcggggtagcctcaccggcctcgggttgccagagcttcctggggaatgcgccggatttgggttcggaggggggtctggcggggtgactgagttcgtcgggctgcaggggtttccgggccggcgcaccaggctccggcagcgaggccttcaaaggggcctcaccgacctcaggctgcaggggcttccttggaaacggagtggcccccagctgtgggaacttcttggagaggtcactcaactccagtttggacggcttcttggggaggtcagtgacctcaggcggcgggggcttcttggggaggtcagtgacctcaggcggcgggggcttcttggggaggtcagtgacctcaggcggcgggggcttcttggggaggtcagtgacctcaggcggcgggggcttcaaggacactgcaccaaactcaggcagcggggccttcttggggtgctcgcttagctcaggctgggagaacttcttcagtttaccaaactcaggcttcggaggttttttgggcaggtcgctgggctccggctgagaggcctggaactttgctttgatgctccggaagtcctgatggctctcctaggagacgcagagccaatgaggcaggggctcaaacacacagaaggggcatggaaggatgggcctggggaccctcaggcacagcccacaaccaccacccctgcgcccaggcccggtcagccctcagctctttcccaggagcccccatggatcctaggatcctgggaccgacacccctccctacttctccatttagtgctgattccacacccaacctcctctagcagcactggagatcccgacatccctcctgcagcctccagtcccactgccctccccccatgggtggtaccccacccccccagcatccttgaccccctcattctttcacccctcccactgcatgtctccagtctcgttccattgcccaggctggagagcagtggtgcaatcatagctcactgcagcttgcaactcctgggctccaatgattcccccgacctcggcctccccagtagctgggattacaggcttgagccgccgcgcccaggcccccagtcccttctgtgctaatttcaaaacacatccggaatccaaccacttctcactgccttcaccactgtcaccccaggaggtagtgggaggcagtgtctgccctcccccaaccaattgcctggattactctaacaagcccttccctgggcctctgcctacccccttccctggtcagttccccccatggcagctggagggagaagcctgttgaaccctgagtctgtttgtgtccctctgctcaaaactcggcaatgcttcctcatgtccccacagttcaagctaaatgcctcataaaagcctgggcgaaccagcctccctacccagccaccttctcctccctgcaccctgaacacttccctccgacctcggggcctctgccctgtccctgacccaggacatgtctctgcaccacctgggtctctccttttcctcctcccagcctctgttctcatattttcttattagagaggccatccaaggccaccctatttgtttatttttattttttgagatggagtcttgctctgtcacccagactggagtgcaatggcgcgatctcggctcactgcaatctccacttcccaggttcaaatgattctcgtgcctcagccgcccaagtagctgggattacaggcactcgccaccacacctggctaatttttgtattttaactagagacagggtttcaccacgttggccaggctggtctcaaactcacgacctcaggtgatccaccctccacccgcctcagcctcccaaagtgctgggattacaggtgtgagccaccgtgcccaacctagaccaccctatttttctttctttcttttttttttttttttttgagacggagtctcactctgtcacccaggttggaatgcagtggtggaatctcgccatactgcaacctccgcctcctgggttcaagcgattctcagcctcctgagtagctgggatcacaggtgtctgccacgacgcctggctaattttttttgtatttttaatggaaacagggttttaccatgttggccaggctggtctcgaactcctgacctcaagtgatccacccacctcggcctcccaaagtgcatgagccatcacgcctggcctagaccaccctattttaaatggatcaccccatcccactactgccctgcattcagcatgcatgattttctccatcgtacccacccctacgtattatactattttacattgtttttaatgtgtcttgatttttttttttttttttttttgtctctctacaccacaacttccctcagttcctcagcctctgcaaggcagagacttggctcattcattgctgtcttcccagggcctggaacatggtaggtgctcagtaaatatttgctgaaataaacaatattcaggcagcacaaagacagccatgtactcagcctgaccatcaggaaaacacagagatgcctggagacggccatgcggtccctctcacaccgtctctgacatgcgggctgatggtcaggaatgctcacagttgacagtgcctgagaggattggtgcagacaccgtgggcacaggcgctgtctcctgcatacccagctgtcccagctgccctcctagctggccctgcaaccactcctcacagaggtaggcagattcacaagaaggccaggcctccttagtcctacaaacgcccctttcacctgtggtcaaggagattgggggagggaaagggcagaaacgtgtggcctttgcttcctgcgtgtgcctcactttccccatccagaggaccagagaccaggattgctccttggaaaggcagcaattcccacctggggcctgaagtgcccctgtcaaagccccgagtggtttgaaggaagtgctcccgggcgaccacagggctagataagtcagggttagcaggtcacaacttgggtgactggacgggggagggtcatgacccactttgtcaccccgcaggaaagcactgctctcaccccagcagcccgttcccacatggctgctcatgttgacctggggagacgggagttgtccccccggggagtcccatctgtccccctcgcagtcccaacctgagcgtgaacccccaggagcccgcgctgtcctggggtgtgcctggtggccgcctacctcgggtcctttttgccgacccttcccgtttcccagatgtctttcgcagccaccccccgcccccccgcccgcccctccacaggtggatcctatccttctgggaacatctgtgtcccttgcttcccagccagtgaggcacaggcctcttccagcactcaccatggctgcaggcaggtgatgggccatgggatgagtgggacccgagctggggccgctgccttcaggaagtgactgtggcttctgctccacggtcagcacacagggtgggggctgctagaggtggggcgggggagggcagaggaggaagggaaggaggtggggaggctccagtccgtctccagatcctgccagccacttctttttttttgagactgagtcttgctctgtcgcccaggctggagtgccatggtgccatctcggctcactgcaacctctgcctcccgggttcaggcaattcttttgcatcaacctcctgagtagctgggattacaggcgcgcaccaccgctcctggctacttttcgtatctttagtagagaaggggtttcaccatgttgggcaggctggtctcaaactcctgacctcaagggatcggtccgcctcggcctaccaaagtgctgggattacaggtgtgagccactgccccggcccctgctgggcacttctatttcgcttgaattcctgtcctgcctgctactgtcccaagcttggggcactggttgcccgcatgttcctaacatggtcactagtttctttcttttttttttttttttttttttttttgagacggggtatcactttgttgcccaggctggagtgtagtggcgcaatctcgactcactgcaacctccgcctcccaggttcaagcgattgtcctgcctcagtctcctgagtagctggaattacatgcatgtgccaccactgccggctaattttttgtatttttagtagagacggggtttcaccatgttggtcaggctggtctcaaactcccaacctcagatgatctgcccgcctcggcctcccaaagtgctgggactacaggcgtgagcaaccacgcctggccaactagtttcttactctctatagtccccatcattcctactactttggtgtccccatctctggactccagggaggactccatgccaggccctggtgacctcctgggctagagagccacaggatggggagatctcagcagatcaggggtacggacagctctggggtttaggaggctcctggggaggcccagaggcccaggacgtgggggcccatgtgaccgggtgaggcctctgctgtctgccctggttggctcatccgccttcctcatttcaacacttccatgaaatccaattcccggctctgagcaggactcacttgttctggggcagatatcacaggccatggatgtcccaggctgccgccctgggcagaaagcttagctggtacagcagatttgggggtcggtgggtgagtggtgtcaaaggccttgcacctgggccacgcacggtggctcacgcctgtaatcctaacactttgggaggctgaggcaggaggatcacttgagcccaggagttcaagaccagcttgggcaatgtagcaagactccatctctacaaaaaatataaaattagccaggtgtgatggtgcacgcctgtggtcccagctgcttgggaggctggggtgggagaatcacttgaaccctgaaggcggaggttgcagagtcaagatcacgccactgtactccatgctgggtgacagagagagactccatctcaaaaaaaaaaaaaaaaaaaggctttgcagttctggaggagtgagggggtctgaggacccgaggacacaccagattcccagaggttagaggtagtagagagaagaggaaccaggagacagagacaggggccaagagggggtgaaggcagtcacttgtggtgccgaggactggccagataaggacaagccctgaccacagagctcagcccacaggagatcagtaatctccgtcacggtagacaaagggagaaaacacctgctaagagagtagagagccctggttttcagtttgagcacatgttggaattgcctgaacagttaaaaaaaaaaaaaaaagaaccggcggttgggcagtgtggctcacgcctgtaatcccagcactttgggaggctgagtcgggtggatcacctgaggttgatcacctgaggttgggagttcaagaccagcctgggcaacatggagaaaccccatctctactaaaaatacaaaaattagctcggcgtggtggcgcatgcctgtaatcttggctacttgggaggctgaggcaggagaattgcttgaacccaggaggcggaggttgcagtgagacgagatggctccactgcactccagtctgggtgacagagcaaaactccatctaaaaaaaaacaaaacaaaaaacagaacctacaagaaactctgacttaatcagtctggggtgtggcccgagcaagtatttttaaaacattttaaaattttttttttgagacaaagtcttgctctgtctcccaggctgcctcccggcttcaagtagctgggattacaggtgcctgccaacatgcccggctaattttctggatttttagcagagctggggtgtcaccattggccaggctggtctcaaactcctgacctcaagcaatctacccacgtgggcctcccaaagtgctgggattacaggccttagtcactgcgcctggcctgcctgttttcacgcctcctttaagagcacagacatcaggattctgccatctctgttgtgcctttgcatcctgtcctggggcacagttcccagatgtgggttgccctcccaaaaaggagtctcgggaggacagtatgggctctctgtgggtctccagaaccttggcaagtgaaggaaagaatgaaagaaagaacaagtggccaggcgcggtggctgacgcctgtaatcccagaagtttgggaggccaggcgggcgtatcacctgaggtcaggagttcgagagcagcctggccaacatgatgaaaccctgtctctactaaaaatactgtttgtgcacacctgtaatcccaggtacctgggaggctgaggcgggagaatcgcttgaacccgggaggcggaggttgcagtgagctgagattgcgccattgcactccaacctgggtgacaaggcgagacaccgtctcaaaaaaaaaaaaattaaattaaataataaaaataagtaaataaataaatcaagcaatgcttggccacagtaaggagctcaatcaaggtaattaaaggattggatgacagctgatggattcccaggtgcctgggctggtcactacccgtgcactctcgcagctaggagggtccagccagggcgcgcgcaccaaggccccacgggggcgccgtgggggtgaagcgcaggtcccggagctgtagtcatggtgcgcctccccgccaactaccctttgtgtatttggcgcctccgtaggggctcccggcagggttccgcgcggcgcggctgcagacagggacagatagggttaccggaatcccggagaagggagcccggaccaggggagtgagagttcgttagggcgcgccttggggaatctgcggggtcggaaacgcgaacaacggtgtgcagggggaggagcccggggagcacgtgggcggcggatcccagggccgcagggcgccctccacctccccgctcctggcccgcaatgagggtaaccggaccggcacctgcaagtgacagctggggctggacaaatgccgggcacgggcctctggccggcctcagagctgttcagcgcgagcccgcggcttccagccaacctgcccgctatccccactgctctcccggctttcattcccccgagtctgagattcctgggcgccccctgctgggcggagccggggcccaagagggctgggctcctgtgcatgggggttgggggccggcttgagggtaggaggtcgtttctgcagtggacagggtgaacggtggaggacaggtggtgagccagctccccaggcctcgcggcagtcagttcactccagagggtagtgtggtggccgtgggcccgctgtacacacaggaagggctgtcccatctccgtgggtgatggggtaggggagaggtccctggacggacgtgttggctctaggtttctctggaaagatactgacagactgggaagaggcgtggcctagatctgggggtggccgaataaagaaactgatggggacaaagactcctgggggcccccgggaccctggagaggggttaggggcctgggggacagagaacacagcgctgtccctggagatgggggagaggcttggactacagccagatctagggacctgcagaatgcgggaacaggggcgtgtcctctggacctgctggcagggttttctcttctcgtggtaaccgtgcgcagctcccaagatggtgcagaatcagtgccgctgactgggaactggggctggctagaggcctcctagcctcaccttctctatatatctgtaaaatgggccccttcaccctgtcccaccctcctccccaggtcgagagagtcccaggcagccatgggctcgggacgtgaagttctcagcagacatttcccaagcccctcctctccctgcagcctctcttttcatcctcgcgtccaccccaaaggactcaccagtcatcatgacacccttttaaggacgagggaattgggaggcagggaagtcgactcttttccagggtcccacagtggtggtttcaaggcttctggctgagaagggggagcttagggggcctcctgatggcctgtcctaccccatcctgacaaccacctcagctggggcctacaggttctgggagagtggacacccagcccaagccacgtcagctgaggctgctgccccgtcacatcacagccccatcaaggacagagcagtcttcaggcccctggtgaggcggtgggcagtggggcagacagacgggtcccaagggcctgaggatcccctcctgccccttgcagtggctgaagggcttctggagcccagagctgtccatctttgaggtgacatggcactgagcaggtgtggggcaggtggcccttggcttgtctacctggatggctttgactcagagcctgaggtggacacgttggtggatgaaaagtccaaggaagataggtgcggtggatcacgcctgtaatcccagcactttgggaggccgaggcgggcggatcatgaggtcaagagttcgagaccagcctcgccaacatgctgaaaccccatctctactaaaaatacaaaaaattagccaggcatggtggagggcacctgtaatcccagctacttgggaggctcaggcaggagaatggtgtgaacctgggaggcggaggctgcagtgagctgagatggtgccactgcactccagcctgggtgacagtgcgagactccatcttccaaaaaaaaaaaaaaaaaaaaaatctgaggaagacaacaaggagggtggcggggggcaaggagaaggtgggagggcagtgacggaggagtggggtctgggggccccgcccaggggttactggtgtctcggctgcagataccaggatgaggaggtgagggggaaccccgaagtggattcagagaatggagaaaggaggaggaggtaaggattgagacaaggtggactgcgtgaaggaggtccctgggttcttgctcacaggatgtctgtatatccaggaggatgagggagacagtgagtgttgttctgggaggggaccgagaggttcaaggtagggccttgtgggctactgggagaacaggatcttcatccagagggccatgggaagccactgaagggtgccgggcaggagaggggaacaatcagaagagaccctggcagggcgtggtggctcacacttgtaatcccagtactttgggaggccaaggtgggtcgatcacctgaggtcaggagttcgagaccagcctgaccaacatgttgaaacctcatcgctactaaaaatacaaaaagttagccggggtggtggcaggcgcctgtaatcccagctacttggaggctgaggcaggagaatcatgtgaacccagaaggcggaggttgcagtgagagctgagagtgtaccattgcactccagcctggcactgccattgcactccggcgagactctgtctccaaaaaaaaaaaaataaataaaataaaaagaggaagaagagactgttttctgttttcagtcttggggtaagggcaggttggggagagtagggggtgggctaggggaccctggggctggcgagatgaggatagaagggagagggatcatggaggtaaaaccagcttccaagggatggctgtggatatcacctgggacttccatacctgggaggctggcttcaggggtgaggagaaagaccaggccatggagggctggccttgacccaccccactcctcagagctgggacatggtggaaattggtctggcagacagcaaggaggatgaagacctgagtccccagcctgcctccccaatcccaaaggattcttccccttaagtcagtatggggttcagggtctgggggtcttcaggccatcctggccagtccctgcactttctcaggaccagccttccagcctgtccccgaagctcctgggattttttctttttttgtctcccaggctggggttgcaatggtgtgatgatggctcactgcagccttgaactgctgtgctcgtgatcctcctgcctcagcctcccaggtagccaccacggctatttttttttttttttttttttaagacagagtttcactctatcacccaggctggagtgcagggtcttgatctcggctcactgcaacctccatcccaccgggttcaagcgattctcctgcctcaggctcccgagtagctgggattataggtgcccaccaccatgcccgactaattttcatatttttagtagagatggggtttcaccatgttggccaggctagtctccaactcctgacctcaagtgatccacccacttcggcctcccaaagtgctaggattacaagcatgagccaccatgcccagccatgcctgattattttttgtattttttttggtgggcggggaggtagagatgcgatcttgctaggttgcccaagctggtctcgaactcctggcctgaggcgcccctcctgcctcagcttcctaaagcactgagactgcagacattagtcacctctcctggttacgggattgctttttaattttctttatttttgagatggagttccactcgtattgcccagactggagtgcaatagcacaatctcagctcactgcaacttccacctcccaggttcaagtgattctcctgcctcagcctcccaagtagctgggactacaggtgtgcgccaccacacctggctaattttttgtgtttagtagagatggggttttaccatgtaagtcaggctggtctcgaactcctgacctcaggtgctccacctgccccagcctcccaaagtgctgggattacaggcgtgagccactgtgcccggccgggacttcttaaaagaaaactggagaccgggcgtggtggctcacgcctgtaattccagcactttgggagtctaaggcgggcggatcatgaggtcaggagatcgagaccatcctggctaacgcggtgaaactccatctctattaaaaatacaaaaaattagccgggcatagtggtgggcacctgtaatcccagctacttgggaggctgaagcaggagaatggcgtgaacccaggaggtggagcttgcagtgagaggagattgtgccactgcactccggcctgggagacagagcaagactgtctcaaaaaagaaaaaaaaaaaaagaaaaaaaaaaaaaaagaaaactggagagtccccatcccatttggtttctggacaagggagaacgctgccacagtgggtactggggacctcaaccacagctggaggtggggacctgggtcccaggattggggtgatgggaagacaggacacaggtgggctgtgaggcctgcacctgtggacccaggtggtcctcccaagatgtgatcaatccatgactgctgggctcgagcccactatgctttggatggacaagggatgggaacacagcataggctggctcatggcgccttctttattgtccaccccagccccccttccctgcagccccctccaaatgacaaaactacccacatcccatggcccacccccaaagcggcgggattcagagctgcgagaacactggaagctccccctctgacagcagcggcgacaccttgggtgcaagcggggccggatctgggtggggcagaggaggggggcgcctgagcctcagcgccttgggcccccgcccccctctccacccgcgcattcctcggccttacccgcgggggcgtcggggcgcggcggcccggccgcgggggccgcgggggcgccggggcggtggtcctccaggtgcagggtcatggcgggccgcgaggccgtggagaaggcgcactgcatgcacgagtagcggccgcgtgtgtgctcccacacgatgcggctcggggccgcgtgccctgcgggcaggcgggaccccgtcagtcccgggctcccccagcccagaagacccgtgcgccaaggatggaggacgccggcgagggtgggtgggactttttcccgccccccatcagcttccgggcgcctagttcagtttctcccgggtctgtctgcccctagagttgggggcacccaacttggcttctccgcgtcccctactatcatccccagattcactgttggggagaagcccgctccgaggtgaacggtgaaaggggcgcaaggtttatacgggaacgccggcgcagatgaaggcgcaggtgccagtcatttttaaggcaaaaatcctgtatttcgggacggtggcatttgtgccccctgggaaggggatgagcactgctgcctcctggtatccaccagaccccgcagggcgcaggaaagaaagcccctccacccctccctggtggtcacctgcacgcacctgagggcgcgtcggagccgccctggggtcttcgggggctgctgccagcacctgcggtaaaggggcgggtcaagttcagagtcagggcgagcccagccagccctcctggaggcccccgaccccacactcaccttggctctttttccagacggcggcgctggaagccggcggcccgggtgcagcggccaggaaggggcgcaggcgcggggggcttaggccaaagggcgcagggttcaagtagggcaggaacggtccggtgggggcaggggcgggggtcgtgaagggttccagcagcgggaacggcaggcccggcgctgatgcggggtcaacctccggggggcgctccggcgcgggcggctctcggtccagggccgggggtggcggcggggctgggctctgcgcatgctccgcgcaaacatgcaggtgcttgaagagcgagcggtgcgtgcggaagcgcaggaggcagttctcacacctggaggtgggcagagggctgggctgggctgggcctccaggggcaccagggagagtgtcctgtgcaatgccacccgcccttcgagcgtgggaacggagcctgggcactaatcacctccccgctcctgtacaactgtggcagcgacccttcctgaccacttcgggtgggaacctggggaaacccggaaagaagtctcaattttaagttaggcggccggttttccacttgggaggtaaagcctggctgggtggggccacgcccacgtatgccccgccccatccagggagttgagggcggggcttccccaaaggcccacccacatcaagtcccgccctccaacaccctgaccaggaagggaggaaggcctggagcccacacatagggtgaggctagggcagggcggagctcaagaggtcagggtctcacttgaagtagcgattgggtttgtagtgcagtttgctgtgagccaccagctcctgcatgctggggaaggtctcggtgcagctcagggctgagcagcggaagagcttgcctggtagggatgaaggacagagaagtggagacaggtggccaaggctggctccgaggggctccgcctgtttcccaccctaacctgcctccccattaccagtcctggccctaccttccagggactgtgtgggcgggcagtgggttcgcagatgctgtgccaggtcacggacgctgggaaaactgaggcagcagccagggctggagcaagggatttgcttccctgcaggacgcacagaacagtggtcactggtcccttcctcactagtgctgtccctgaccccagggttctgccccagagaagcaaatatgatgtgctggggcctttactctctgcctaccacaacagactggtctgccacagtgcaggggctggactggccaggctcaccattggagccacagcctggcatccaccggctgctccgtaaaatgatgagtggcatccctctagaaaggccctgaggttagagattctctacgtctcgcttctattgtttcagggactgtgattccccagaagaccccatcacagatcacctggaggtgggcgtcgtctgggaggccgcaggtcctcgctggtcccggagactatgctggtcaggccagggctgggtccggggccaggctggcagctgtctggggctggggaggagccctgctgcatccctccagcccctccacgttcccacactggcggtgtggctgcctgctcagggcctggctcctccgacatggaggaggaaggggctgcagctggcacagccggggacaacacctccttgtcggtctcactggagctgggctctgcagtggccagcatgtctgggatgggccctgagggtttctcctcctggtggaaggaagaggcggagagaacccttctgggctctgggtcaacccagtcggcccccatcctaaggaatcaccagcaggagaggataggggaatacgtaagggtggactaagctctttttttctttttataaagatggggtctcgccatgttgccctcactggtcttgaacccctggtctcaagtgatcctcctgcctcagcctcccaaagtgctgggattagagtcgtcagccactgcactggcccggattgagctccttatgcatacgggagaaacatctgctctcctcaactaggataggtgggagccccagtatgcacacaagcgtggcctagagggagtgggcggggccaaggctacggaggcggggctatgggcaggcatggactgggaagatgctagaggagctagacatggattgtctgaggaccgagaccggccggcctcgagcagtgtggacaatcttggaggtgctgggggcccggatgtaagaagtttaggggcggagtcctagcctgacgggcgtggtccattccgggccgggcccggaagtagggcgctctccgagtgacagccagcggcggacgggtgcccggatgtgggggcggggtcggccggaggctgtaggcgcgacagggccgctccccgccagtccccgcagctccgccgcgcccgcgaccccggtgccgcgctcaccatcttcgacacggctcggcctcttgtttctgcggctccggcggctgcagcttaggcggcggccaccctctgggcagtgcgagttcgcgctcacgtcagcgccattttccacctctcagctctcgcgagactgggggcggggcctgcgcagggcgctcggagagggggcggggcctgagggcagagtcaccctggagctcaggtcggacgctggtgcaatcttgctatctatccccgggcagtcagcgcgcacttcagcagactccgtgcacggagatccgggatgacctcgctgtcctagtcttcaaagtgggcaccttcatccctctagtcttgtcccaagatcagccctggacaggcgataaacagcagttctttctttatattttttatttttttttgagacagagtttcgctcttgttgctcaggctggagtttaatggcgcgatctcggctcactgcaacctccgcctcctgggttcaagcgattcttctgcctcagcctcccaagtggctgggattacgggcgcccaccaccacgtctggctaattttttgtatttttagtagagactgggttttaccatgttgtccaggctggtcgtcacctcctgacctcaggtgatccacccgcctcggcctcccaaagtactgggattacaggcgtgagccaccgcgcccggccagttctttattttttatagtgttgagacagggtcttgctctgtcgcccaggctggagtgcagtgatgcgatcatagctcgctacagccttgacctcctgggttcaggcgatcctcccatctcagcctcccgagtagctgggattactggcgtgtgccaccatgcccagctaatttttaaattctttttagagacagggtctctctgtgtgttgcccaggccggtctcaaactcctgggctcaagcgatcctcccgccttggcctcccaaatgttaggattgcaggcgtgagccacctcgcctccccttgcactcacattttaaaatggggaaacagcatcgctcgagccagggacgtcgaggctgcagtgagcgtgatggcaccactgcactcctgcctggtcgaaaaagcgagacccccatctctaaaagttaaataaaaatggggaaatagtaaatcaacaagtgcaaaaacaatcttttgtcctattcagagcaatgaaggaaacaatgaaatgtcgaagtgatgggtcagggaagccactctgaggaggtgacttcggagctgtctccagatgatcaaggagtgagctggtggaaagcccgaggagcagggggctctaccggatagctggtggtgatgtcctggagtggggcaggacgggcttattttggtcaaagagcagcgaggtggccagggcaccactggagcagagtggaggcggggtgtggaggtcagaaagcgaatatggtgcgcggcaggtcacgcagggccatgggagtggtgcagagagaggagtgtggtttatgttgtaaccactgatgaatttttagcagggggaggcgcatcatctgattcctggcagtcacttggagtaggatgggctgttgagagggcggtaaggtagatctaacatcttagatctctctgctgccatatcatctaagatgagatcatcttagatctcatcatgctgccattcaagaggtattcgttgagttctaggcaactgtagggttttttttgttttgttttgttttttttggacgacatcttgcactgcacccaggctggagtgcagtggcgcgatctcagctcactgcaacctccgcctcctgggttcaagcgattctcctgcctcagcctcccaagtaacagggattacaggcatgtgccaccatgccaggctaattttgtattttcagtagagatggggtttctccatgttggtcaggctggtctcaactcccgacctcaggtgatccgcctgcctcagcctcccaaagtgttgggattacaggcatgagccactgcacctggccacaattgtaggttttatgtgcagtgtatttccatctgcaaagcaagttgtacctatgcactttttttttttttttttgagacagagtctcactctgtcccccaggccgcagtgcagtggcatgatcttgcaagctccgcctcctgggttcaagcaattctcgtacctcagcctcccaagtagctgggactacaggcttgtgccaccacgctcagctaattttttttgtatttttagtagagacggggttttgccatgttggctaggctagtcttgaactcttggcctcagagatccacctgccttgggcttacaaagtactgggattacaggcatgagccactgcatccggcttttttgtttgtttttttgagacacagtcacactctgttgcttaggctagagtgcagtgatgtgatcacagctcactgcagcctcaacctccctgggctcaggtgatcctcctacctcagcctccctagtagctggtactaaaggtgtgtgccaccacacgcagctagtttttatatgttttgtagagatggggttttgtcacattgcccaggatgttctagaactcctgggctcaagtgatctatctgcctcagcctcccgaagtgttgggatttcaggtgtgagctactgtatccagccccctatgggcttttatatgcagagaatacctttaggagatatttaaaaactggggagaggaacagggatgtttgagtgggagagagactgagttttcacttttgtgttttttgaattattattatttttttctgtccaggcatggtgtctcaagcctgcaatcccagcactttgggaggctgaagtgggaggatcacttgaggccaggggtttgagactagcctgggcaacagagcaggacgccatctctaccaaaaataaaaagattagctgggcatagtggcacatgcctgtagtctcagcttcttgggaggctgaggtgggaggattgcttgagaccagaatttagaggctgcagtgagctgtgttcatgccactgcactccatcctgggcaacagagcaagaccgtgtctctaagaaaataaaacaaaaggccaggcacggtggctcacgcctgtaatcccagcactttgggaggctgaggcgggcggattacgaggttaggagttcgagaccagcctgaccaacatggtgaaatcccatctctactaaaaatacaaaaattagccaggcatggtggcacgtgcctgtaatcccagctactcgggaggccgaggcaggagaatcgcttgaacccaggaggcagaggttgcggtgagccgagatcatgccactgcactctagtctgggcaacagagcgagactcagtctcaaaaataaatacatacatacatgcaaaaataaaaaataaaacaaaaacaaattaaaattttttcttttaattattattcattcagttgaaaactcatttcatttaaaaaacaaagatcattttaatgcagggtaaggatgtgtgtgtgtgtgtgtgtgcgtgtgtgcaggggaggctagtgcaatctggggaaggatggggtgaggtggcagaagggacagggacccaaggaaggaagggagaggagggactggacttaagaaattttgtaaaagagtcaacaggatgtgggggtgagcagcaggcggggcacacatgactgaggtctgcagtctgaagatgcctgtaacctagataggagatgattatcttttagcatatgctaaacgtttaagataatggccatggtgccgtgcacagtggctcacacctgtaatcacggcactttgggagggtgatgcgggatcatgatttgattctgggaatccaaggctgcagtgagctatgatcataccactgcattccagtctgggacaacagagtgaaaccctgtctcaaaacaacagcaacaagaatcagatgctggagtgcagtggtgtgtgcctgtaatctcagctactgggggaaggctgaagtgggaggatcgcaggagcccaggtggtcgagaccagcctgggcaacacagtgagaccccatcttcaaaaaaagaaaaggaaattcagagatggaaagcactagggccattcaagagattgctaaatgcttttgtgtcatcattgagcaataaaagggcccttgagacccggttgcagccttgagaattttttccagccatgctcagcttcccaagacaggcacagaagggagaatagattctgcagaaggttctgctggccattcttgctgtctctctctctctctctctgtgtgtgtgtgtgtgtgtgtgtgtgtgtgtgtgtcacagtcttgttctgttgtccagactggagtgcagtggcacaacctcggctcactgcaacctccacctcccgggctcaagcgattctcctgcctcagcctcccgagtagctgggactatagtcgtgcgtatcatgtccagctaatttttgtatttttagtagagatggggtttcaccacgttggccaggctggtcttgaactccttacttcaagtgatctgcccacctcagcttcccaaagccctgggattacaggcgtgagccaccgtgcccggctgctagtcttgctttgattcctggctctactggggattcccgatgccccattcttccgttgggtaggtattctgtgcccgcagttcgctcatcacagcttagatcactctgtgcagtgcttgtcaaccaaatctgctgagaccgaccctctcccaccttcctggctcctgctgcaacgcccattccacctctgaattcccctcgcttctgtgggccagtcctcacctcaccagtcagccccatctctactggactggcttctctttgaggggctgagcacagagcgggtgtccatattagaaagctacaattaattattattattattattattattattatttttagagagagacagggttagctctgttgcccaggctggagtacaatgttgtaatcagctcactgcagcctcgacctgctgggctcaagtgatcctcccatctcagcctcctgagtatctgggaatacaggcatgacactagctttttttttttttgagatggagtctcactctgtcacccaggctggggtgcagtggcgccatctcggctcactgcaacctccgcctcccaggttcaagcaattctgctgcctcagcctcccgagtagctgggaccacgggcgcgcaccatcacgcccggctaattttttgtatttttagcagagatggggtttcactgtgttagccaggatggtctcgatctcctgaccttatgatctgcccgccttggcctcccaaagtgctgggattacaagtgtgacccaccgtgcccggccaattttaaaatttttttgtagagacagggtattagtaggttgcctagggtggtcaaaccttaagtgatcctcctgccttggcctcccaaagtgctgggattacagctgtgaggcaccatgcttggccaggatttggtttattttagtattagagacagggtcttgctgagttgcccaggctggagtgcagtgacgcgatcatagctcacttcagccttgaactcccgggatcaagtgatcctccagcctcggcctcacaaagtgctgggactacaggcatgcaccaccactcccaaaattcaggaatttttttttttttttgagacagagtctcactctattgctcagactggaattccatggtgcagtcttggctcactgcagcctccacctcctgcctcagcctctcaagtatcagggactacaggcacgtgccaccatgcccagctaatttttgtatttttagtagagacagggtttcaccatgttggtgaggctggtctggaactcctgacctcagatgatccgcccgccttggcctcccaaagtgctgggattacaggcatgagccactgcgcccagcccaaaattcaggatctttaggctcagaccatagcaggactccagtcttagtcccagttaggtgaagactaagagggcacagaaatgggattggggtgcagggggcaggagtgacccagagtgcattgagggtgggagcatgtggcatgtgggacctgcctctctccataggtcccagatgggtttggcggctgtagcttcaagactaacaggacctgctggaccatttgggatgcagattttggaagggaaactgagacaaattctttattttcttttctttcttttttttttttttgagatggagtctcgctctgttgcccaggctggagggcagtggcgcaatctcggctcactgcaagctccttctcccaggttcatgccattttcctgcctcagcctcccgagcagctgggactacaggcgcccgccaccacgcccggctacttttttgtatttttagtagagacaaggtttccccatgttagccaggatggtctcgatctcctgaccttgtgatctgcccgcctcggcctcccaaagtgctaggattacaggtgtgaggcaccgcgcccacctcctccctccctccctcccttccttcctttctttttttctgagacagggtcttgctctgttgcccaggctggagtgcagtggcatgatctcggctcacggcagcctctgcctcccgggttcaagtgattctcctgcttcagccttcccagtagctgggattacaggcaggcaccaccacacccggcttttttttttttcttttttaaatttttagtagaaacagggttttgctgtgttatccaggctggtcttgaactcctggtctcacgtgatctgcccgcctcagcctcccaaagtgctgggattacaggcgtgagccactgcgcccagcccaaactgggacaaattcaagctttatggtcacatatgaatgcaaggcatggctctgtgcagtcttgggtcagtgaacctctctgaacctccattgttccacctgtaagatggggtccttcacagctcctacctcacagggctgtgaaaacatcgtccttgttgggcacttagtaagttaactcgtgctttcacctggcaaaggtttattgccttagtgatgacagaatgagcaaagtcacgcttgttaaggacccccccctccccaactgtgcctggcactttgccaacagcacaggactcaagacccatttcttaatcacatggcagttgggaggtagattctgctgttagtcccctttgacacacacagaaatggagaatgggcagcaggtgtgatgttggaggaagaccagggcccaggggcgggggctgcagcagtgacctggtgacccagggcctgggcaggactggaggccaaaggactggacttttaggctattgcagcccaggtaaacgaggctctcattggcagggcctggctccccaccaggccggcaggcagataggcgggcgaaagagaaggcagtatcccagggcccagctcagatcttctccacgtagtttcctgggaaaaggccctcctggccgtgaagccggcccttccaccagcccgagggatctgtgggagagaggaaagcttgaggtgcccctagctggccctggagaaagctctcatgcctggtctgtccatcttgttcatggggactccctatgttgtccaggctggtcttaaactcctaggcttaagccatcctcctgcctcagcctcccaaagtgctggaattacaggtgtgagccactgcatccggccatttctactctttaaaagttttttttttgtaaatcttttgtagagatggggtcttgctaggttgcccaggcttgtctcaaactcctgacctcaagtgatcctcctgcctcagccactgaaagtgctgggattacaggtatgagccacctcgcccatctgttatctctgttctcccgtggggagggtgtgcagtggtggggtctgcctggcaatgtcagtcagggttctttttttttttttttttgagacggagtctcgctctatcgcccaggctggagtgtgttggcgcaatctcggctcactgcaagctccgcctcccgggttcatgccattctcctgcctcagcctcccgagtagctgggactacaggcgcccgccaccacgcccggctaattttttgtatttttagtagagacggggtttcactgtgttagccaggatggtctcgatctcctgacctcgtgatctgcccgccttggcctcccaaaatgctgggattacaggcgtgagccaccgcgcccggccgatgtcagggttcttaccactcccctcaccccagcttctgccctggtacacacaccttccatgaggatctcaatgacctcgttcacgttgaagctcagctcgtccacatcttggcccacgtactggtatagggcccggcacctgggaccatgtgtccgaggctggggcttgggtcggcccacaccaggcactggccgttgccccacgctgcgcttcctctgcatgctgtgggcacagggggtttgagtcacagccccagacactcccctaccccctgcccacctcctggagctgccctcccaccccacctacccggccatgccctggtcaggcacgttgaggaattctgtgttgtgctctgagggcggacgtgcccggggtcgtctgctggctcccagggatgtggacggagggccccggggaggcctgtgggtgccccctccagacatgatctccaggggcagggggccccctctggcagaggggggcaccccattgcgatccatgcctgtggcaggagcaaggatgaagacatgtattagggtgatgctaggaggatttgaggaggacttggcttcaagttctcaggctgagggaggagactgcgacactctcaacccagtgtggtaaggattgggccagacggagggactctgccgctaggagggcctagacagaagcttttttaagcataattttaaaattattttttacttttttttttttttgagatggagtcttgctcagtcgctcaggctggagtgcagtggcgcgatctcggctcactgcaagctccgcctcctgggttcacgccattctcctgcctcagcctcccgagtagctgggactacaggcacctgccaccacgcctggataattttttaaatatttttagtagagacggagtttcatcatgttagccaggatggtctcgatctcctgaccttgtgatccgcccgccttggcctcccaaagtgctgggattacaggcatgagccaccgcgcctggccaattattttttacttttatttgtttattttgagacatggtctcactctcgcccaggttggagtgcagtggtacaatcgtagctcactgcaactctgacctcctgggctcaagcaatcctccctccttagcctccttttaaggggagctgggactacaggtatgctccactatgcccagttgatttttataatttttaaagtagagatggggtctcactatgttgctcaggctggtctcaaactcctggcctcaagcaatcctcccacttcggcctcccaacatgctggttttacaggcatgagccactgtacttggccttatttattttttatttgtttagagacagggttttgctctgtggcccaggatggagtgcagcagtgagatcatagctcactgcagactccaactcttaggctcatgatattctcccctctcagcctcctaaatagctgggactataggcacacaccaccatgcccagctaatttaaaaagaatttttaggctaggcgcggtggctcacgcctgtaatcctagcactttgggaggctaaggtgggctgatcacgaggtctggagtttgagacaagcctggccaacatagtgaaactctgcctctactaaaaatacaaaaattagccaggcatgatggcgtgtgcctgtagtcccagctactcgggaggctgaggcaggagaattgcttcaacctgggaggtggaggttacagtgagccaagatcacgccactgcactccagcctgggcaacagagcaagacaccgtctcaaaaaaaaaaaaaaaaaaaaggccgggcgcggtggctcacacctgtaatcccagcagtttgggaggccgaggcgggtggatcacgaggtcaggagttccagaccagtctggccaacatggtgaaaccttgtctctactaaagataaaattagctgggcatggtggtgcatgcctgtaatcccagctactggggaggctgaggcaggagaatctcttgaacccagaaggtggaaagttgcagtgcgctgagaccgcaccattgcaccccagcctgggcaacagggctagactctgtctcaaaaaaaaaaaaaaaaaaaaaatctaggcgtggtagcacacgcctgtagtcccagctactcagggggctgaggcaggagaatcgcttgaacccaggaggtggatgttgcagtgagccaagatcatgccactgcactccagcctgggtgacagagcgagactgtctcaaaaaaaaaaaaaaaaagaaagaatttttggtagagacaggatcttgctatgttgcccaggctgatcttgaactcaagtgatcctcctgccttggcctaccaagagtgcttggattacaggtgtgagccatcttgcctggccaggagtggctttgcaggggcaagtttccctcctcctatcctctgtaggagagcttctgtgggtacgtcttggtggataaataagagctcaacgaatggaatgggaatttgagagagaagcagagaaaacggcccaaaggcctggaggtaagaataaattttgtgaattgggaaaataagatgtagtttgaggccaggcgccgtagctcatgcttgttaatcccagcactttcggaggccgagacgggcgggtcacctgaggtcaggagttcgagaccagcctgaacaacgtggtgaaaccctgtctctactaaaacgatacaaaaattagccgggcgtggtggcgggtgcctgtaatctcagctactcgggaggctgaggcaggagaatcgcttgaatccaggaggtgaaggttgcagtgaaccgagatcgctccactgcaccccagcctgggagacagagttggactccatctcaaaaaaaaaaaaaaaaaaaaaaagatgtagtttacagggcaggagtgtagggtaggaggagagaagatgtcagtggttagctgggtttgggttttgaagggctctgaatgccaaactaagtttagcctttattctgcgggagatgtggagctacggagagtcctggacagagaagtgagtggtaaactgtgtttgttagatttcgtttgctgaaggtctggcttaggccatgggacccacaacagacaagggaatatagcaagggacgcagctcctcacctctggggggcgcaggggccgcccgggtaggggcttgggacgacctccgaggttttcccttggccattcccttccgcgtaggctctgaaagaagagtgtcagggagttgaatgacagacagaccacgctctttgccccgcccacaaatctagtccattctgaggctccgccgcaccccgccccctcaggctctcccattagcaccgccccttaggtacagttacactggctccgcccactaattggcctcgccccccaagggcccaacacctcactggccttgctctttgggcccgcccactttaggtcactccttcatcactacccagttccagggttgccgctctggccgcacccctctacatttctcgcccccgcattggtcatgtcttctccttaacagtctttctctctctctagacccgccccttccttgctgttgccctctctggtccagcctgctggccccgccccactattttgattggtttcctccatggccacgtccctcctccacatttcacgcccactaattggttgcggcctttgtttaaaagtctgtctctctggccgggcgcagtggctcacgcctgtaatcccagcactttgggaggccgaggcgggtggagcatgaggtaatgagttcaagaccagcctggccaagatggtgaaaccccgtctctactaaaactacaaaaattagctgggcgcggtggcaggcgcctgtaatcccagctactcgggaggctgaggcaagacaatcgcttgaacccgggtggcggaggttgcggtgagccaagatcgtgccacaacactccagcctgggcgacagagtgagactccgtcttaaaaaaaccacaaaactcaaaagtctctctctctctctctgtagacactccccttcctggccttcgtccactcttaaccagcctcgctggccccgccccctctgccctagttccgcgcagactcactggagctcttgggcagcccatcgcccacgctgaccgtgagggtccgaccgccaaccttgagcactgccaagtcgccgaagccgcgggagaaggtgacgctgcgggtgccgccaccgccccagccctccttcttcacccgaaactgtagtctatggggagagaagaaagcttgggggcgctggctgaggtcccccgccccacccaactctcgctggttggggcaggggcggggccgcggccggggccgaagcgcagttcggccgggtcggtggggcgggagagggtgcgccgcgccgagaccaccccgagatggtgctggggttggcggggccgtacgtgtcgctgaaggtgaggggcaggggcctccgcgtcgcctcctcgaagcgcttgcacagaaggctgacaaactcggtcttgaagacgctctccaggaagctgtcggcggcatcctcttggaggatgaagaagtcgtcctgtcgcgtgctggggaggggcgggtgagagcgtcaggtgggacacaggtgagggcgacaggtgagagagacagatgaaggtggctgaaggtggatttagggaagggtcagctaagggccaagtcagcggtgaccaggtaggagaaaaagggggatgtggcaaggagtggaagaggtggttacagaagagggccaggtgaggtctagtaagagggtaaggtgcaggacggaaggatttggcatctaaggatcatgagcatagggggcaggtgaacatgacaggtggggccaacagagggctacaggcatggcaccaggtaagattgtcagggtaacagacggggtcactagaatgagggcagccaggggacaggtgagagtgactgtgcggcaggtaaggacctggcttcacctgagggagactccccgcagagcctggatgtccactttcttcttcaagacttcacacacctggcccttctcaggtcccttcttcactttctctcgcccaatcacatacacacacttgggcgtcaggatcaagtcccgcttgatgggctgtggggatgcaggattagaggctgatgcctgtagcctggccagcctggccacagaggatccaccccaggcagaggggtggtgctggcaggtcaggtgaggaaggtgggagccctccaggtgaaggtgtatgagtcgtctgttttgtagacagggtctcactctgtcgctcaggctggagtgcagtggtgccatcatagctcactgcaacctccccctcctgggcttgagtgatccacctgcctcagcctcctgagtagctgggaccacaggtgcgcaccaccatgcccagctaattttggtattttttgtagattcagggttttgccctgttgcccaggctggtcttgagctcctgatctcaagcaaactgtcctccttggcctcccaaagggttgggattacaggtgtgcgccaccacgcctggccatgagttgttatataagaaacagaaggagggctgggtgccatggctcacgcctgtaatcccagcattttgggaggccgaggcgggcagatcatgaggtcaggagtttgaaaccaggctgaccaacatggtgaaaccccgtctctactaaaaatacaaaaattagctgggcgaggtggtgggcacctgtagtcccagctactcaggaggctgagacaggagaatcgcttgaacccaggaggatgaggttgcagtgagccgagatcctgccactgcactccagcctgggtgacagagcaagaccctgtctcaaaaacaaacaaacaaaaaataacagatcaggcgcggtggcacacgcctgtaatcccagcactttgggaggctgaggtgggtggatcacaaggtcagaagattgagaccatcctggctaataccatgaaaccccatctctactaaaaatacaaaaaactagctgggcgtggtggcacatgcctgtagtcccagctactcgggaggctgaggcaggagaattgcttgagcctgggaggcagaggttgcagtgagccgaggttgtgccactgcactccagcctgggcgacataacaagattctgactcaacacacacacacaaaagagcaaaactctgtctcaaaaaaacaaaaaagaaaaacaaaaaagaaacgaggtcagatgggaatgtgttggttggttggttggctagaaaagggtgtttgggtcagtgaacaggtgctgggtaggtaaggcacctgctggacatgggttcccgggccagatgagaacacttagaccaggtgaaagtacttgggtcatgtgactgtagccagctcaggtaaaggtattatggttcaggtgagggtgtacaagtcaggtaaataggagtatctggatcatgagaggaagtgagcgggtgtgtatctgaactctatgagtttgtacaggaaggcaggtgagggtgtacctggtagaagggtgaatgtgcaagccggttgagctggcctgcggtcagagttctctgggtctagtggggatacctgtctcagtgaaaacatttaaggtgatggtatacaggtcacctgagagggcatacctgccacacagacctgtccaaagcaggtgggtggatcaggtgaaggtacccaataatgtgtgtctggtatgtgaagttgtacagatcatgtgaggaggcacctgccacataaacttgtccaaggtaggtgagggtgtccaggccatatgagactatccatccaggtaaagatggtatataggtgatctcagtgtgtacctgccacacataggcctctctaaggtgagggtagggtgagttactgggctaggtgactctctgggacatgagatatgggtcaagtgagtgtgtacctggcccgcccaggtacaggtgacggtaaacaggccaagtctgggtgtacctgtggacaggagagtccaggctaggtgattagagtacacgtaggttcagggctgtctggggcagaagaggatgtgtctgttggtggaggtgcccagctgtctatgccaagcatgaatgcacgggtcaggtgatgtatccctgtagagagcatgtacctatggactaggctgcctgggccaggtgagagtgtacctgtggacaggtgtgtctgggccaggtgaaggtatatctaatttccaggttgaaggtagagtgtacctaatggatgggtgtgtctaggataggcaagggtggcctcgtggttggggcttctagacaaggtgaatgaatgtgtgattgttgagagatgcatctggccaggtgagggtgtatctgacaggtgtgtctgggctacaagtgcatgtttgatggacagctgtgtctgctatacttgagtgtatacctgtgggcaggtgtgtctgtgccgggtaatgatgtacctgtgatggaacagattgatctaggctgggggatagatacctgtgggcaggtgtgcctgggctaggtgaggatatacctgtgatggaacagatggatctaggctgggggatagatacctatggacaggtgtgtctgtgccaggtgagggtatacctgtgatggaacagatggatctaggctgggggatctatgcctgtgggcaggtgcatatgggccaggtgagggtgtacctgtgatggaacagatggatctaggctgggggatatctggctgtgggcaggtgcatctgggccaggtgagggtgccaggctgtagtcagggtcttgctgtgcccacccactagtgcctcaccttgaagcggcggtcgtacttggtgaccgaatcggcgaagtccacccgctccctcttgcccaggaactgacgcagctcgggccgctcctccagccccaggtagtccccgacgaagttccgattgatgctgttgcgcctccgctccttcttgttcagcaggatgttggaagctgcggggacagagggtggagggcagagctcctgatacagctcctccaggtccttgtgcccccaccccgcgccgtttacccgaagcctctcaccttcctcccgcatctcctcgtacttccggacagccacgtggcgccgccaggccttctggatggttcgggcaaagccatcgaactttcgctctcgcacctcctccaggaggaaaagctgggcgggggtcgtggggggcaagggtgagtcctggtgtctccccaggggctgcagttccgggttttccctgcgctcaccctactcacacgcttttgctcacccatccccacacatgtgctaatttttttaagaggcggggtctttctagtgacactcgttcataaagaaaagaagaaaaaggggccgggcgcagtggctcacgcctgtaatcctagcacttcgggaggccgaggcgggtggatcacctgaggtcaggagtttgagacgagcctgaccgacatagtgaaaccccatctctactaaaaatacaaaaagaaattagctgggcatggtggtagatgcctgtgatcccagctactcgggagcctgaggcaggagaatcacttgaacccgggaggcggaggttgcagtgagctgagatcgcgccattgcactccagcctggacaacaagagtgaaactccatctcaaaaagacaaaaaacaaaaacaaaaaaagctggtggctcatgcctataatcccagcgccttgggaggctgaggcgggaagatcgcctgaggtcgggagtttgagaccagcctgatcaacatggagaaaccctgtctttactaaaaacataaaattagccgggcatggtggcacatgcctgtaataccagctactcaggaggctgaggcaggagaatcacttgaacctgggagttggaggttgcggtgagctgagattgtgccattgcactccagcctgggcaacaagagcaaaacttcatctcaaaaaaagaaaaaaagaaaaagacagggtctcgctccgtcgcccagactggagtgtggtggtgcagtcatagctcactgcagcttcaacctcttgggttcaagtgatcctcccacctctgcctcctgagtagctgggactacagctgtgagccaccatgcccagctaattttgtggtgatgtggtcttgccatgttgcccaggctggaaaaatttttatcttcctccaaatgactggacctccctgtgcgtctctccccatgtggggtacacacttctgccttacatgataacagtgagtcactagcttcagatcacagctgtgccacttactacctgtgtgcttttgcaagaaacggtatgatgtcacggtttcttacactgttactcgacactatccacgaggtacactgccgtgtcagagatggtagaaataggaaccagtgtgcatcttggaaaaccaataaaatacagtaaatatgaaaatgtggccgggtgcagtggctcaagcctgtaatcccagcattttgggaggccgaggtgggcggatcacctgaggtcaagagtttgagaccagcctggccaacatggtgaaaccccgtctctactaataatacaaaagttagccgggtgtggtggcgcatgcctgtcatcccagctactcgggaggctgaggcaggagaatcgcttgaactcgggaggtggtggttgcagtgagcggagattgcgccactgcactccagcctgggcgacagagtgagactcagtcccccgacccctgaaaaaagaaaagaatgaaactccatctcaaaaaaaaaaagaaagaaaaagaaaatctgatgtgtagaactgtgatgtgactagcaaccgtgtggttgggcagtgtacaacctgcacagccatccgtagcaggcccagaaaggaagcttttgcagaaagcagagaaaagggttttgagttgtaaaagtctagacccagaggggacttagagaatgaattacattacagcaagtcaaagtacaaagtctaagaggaatgtctactcatttgtaataacagcaggtgaacaaggtgaggaacctactggatattaaaatactgtaaatctatagtaataaaaacaatagcatgcctgtcagagaatagaatgattaactggaatagggcagatgcttgagaaacatcctacttcaaagagaaactgtgatcaaagggacaatattgtcaattagtgaagatgggaaataatgcaaatataggctgggtgcggtggctcatgcctctaatcccagcagtttgggaggctaaggtgggagcattgttgagcccaggagttcaagaccagcctgggcaacatagaaagaccccgtctctacaaaaactaagcaaaaattagctgagggtgatggcacgcatgtgtagtcccagctattccggagggtgaggtgggaggattctttgagcccaggaggttgaggctgcagtgagctgtgattgtgcgactgcactccagcctgggagatagagtgagatcctgtctcagaaaaaaaaaaaaatacacacacacacacacacacacacacacacacacacacacacacacaattgggctttatttagaaaaattagcacttcacccagagtgctttcccaagtccataggtagcacattgctgctaagagccttgctccctgctctgctgaccaaaatagttttaattttttcagagacagggtcttgctctgtttcccaggctggagtgcagtggtgcgatctcggctcccgggctcaagggatcctcccacctcagccactcaaggctaattatggtattattatatatatatttttttggtagagaggtagagttggggttttgccatgttgtccagactcgtctggaactcctgggctcaaggaatctaccagccttgacctcccaaagtgctgggattacaggcgtgagccagcgtgcccagcctcagattcttcttcttcttcttcttcttctttttttttttttttgagacggagtcttgctctgtcgctcaggctggagtgcagtggtgcgatcttggctcactgcaagctccgtctcctgggttcacgccattctcctgcctcagcctcccgagtagctgggactacaggcgcccgccaccatgcctggctaacttttttgtatttttttagtagagacatagttttgctgtgttagccagggtggtctcaatctcctgacctcatgatccgcctgcctcggcctcccaaagtgctgggaattacaggcgtgagccagcacgcttagcctcagattcttctttaaaacctttagagagtatggccatgccaacaccttgattttggacttctgacctgcggaactgtgagagaataaattgctgttgtgttaagccatggagtttgtggaactttgtttcagctgtcccagcagactattataacatacctgggatgctgggccacaaaggccaacaggcagataaaatgtttgaggatggcccaaaccatgttcataagaaaatcaaaataggggccgggcgcggtggctcatgcatataatcccagcactttgggaggctgaggtgggcagatcacttgaggtcaggagaccagcctggccaacagggtgaaaacccatctctattaaaaacacaaaaattagcctggtgtggtggcgggtgcctgtaattccagctacttgggaggctgaggcaggagaattgcttgaaccaggaaggtggaggttgcagtgagccaagattgcgccattccactttagcctgggtgacagagcgagactctgtctaaaaaaaaaaaaaaaaattcatcccaacatgaatgcatttttggttgagaaaggctccaactccattaagctaatttaatttcttgattactttttaaatatagcacagttaaaccgttggctatttttcttttcttttcttttctttttttcagagtctcactttgtcccccaggctggagtgcagtggcgcaatctcagctcactgcaacctctgcctcccaggttcgagcaattctcctgcctcagcctcccaggtagctgggattacaggcacgtgtcaccatgcccggcttattttgtatttttagtagagatggggtttccccatgttggccaggctggtctcgaactcctaacctcaagtgatccaccaccctggcctcccaaagtgctgggattacagttgtgagccaccgtgcctggccttttcttctattttcattttactaatttttttttttttgagatggagtctcactctgttgcccaggctagagtgcagtggtgcgatctcggctcactgcaacctctgcctcctgggtttgagtgattctcctgcctcagcctcctgagtagctgggattacaggtgcgcaccaccacacttggctaattttttgtatttgtagaagagacggggtttcaccatgttggtcgggctggtcttgaactcctgacctcgtgatccactcgcctcggcttcccaaagtgttgagattataggcgtgagccactgcacccagcttattttactaaaattaaattactgttgcccaggcttgagtgcagtggcacgatcttggctcacttcagcctctgcctcctgggttaaagtgattttcctgcctcagcctcctgagtagctggtattacaggtgtgcaccaccacgcccagctaatttttgtacttttaatagagaaggggtttcaccatgttggccaggctggtctcaaactcctgacctcaagtgatccatccacctcagcctcccaaattgctgagattacaggtgtgagccagtgcgcctggccagcaagattattttcatcaggattattttctttcttttataaatattcagtctgtctttgttgttgatgttcttataggattttaccactaagcatctgccatcgtgaatttcattatttctaccccgtccgtcttctccaaatcaaaatctatagactgaaatttttgtctaaattaaattttactttatatagtctttgctggtgatagttatttttcttttttctttttgtcttttgtagagacagggtctcactatgtttcccaggctggtctcgaactcctggcttcaaaccatcctcctgcctcagcctcccaaagcactgatattacaggcatgcgctaccacacctgacttggtgctagttttattttgccttttttctgttctatgtcaaaatttttggtctatttcttccagagtgtctctctcaatctctctctctcaatctctcaatcacattctttctttcttttttttttttgagacggagtctcgctctgtcgcccaggctggagtgcagtggcgtgatctcggctcactgcaacctctgcctcctgggttcaagccattcttctgcctcagcctcctgagtagctgggaccacaggtgcccgccaccatgcccggctaattttttttgtatttttagtagagacgcggtttcactgtgttagccaggatggtctcgatctcctggccttgtgatccgccctcctcagcctcccaaagtgctgggattacaggcatgagccaccgcgcccggcagtcgcagtctttcttaatctctcgctcagtctctctcagtctcttactttcagtctattaatctctcacttgctttctcaatttctctctcaacctctatctcagtttctctgtcaatccctctctctcaatctgtttctcaatttctcaatctatcagtctttctctcaatctctgtctccctctgtctctctctctctctctcagtccctctctatacctttctctctcttcccctctccttctctgcctgtccctcaaacacactcaccgactctgggttcttgacaaagaccttggtgctccccatctggtactggtcgggctccatgttgaccgcccgaagcaggtgctggacgccctggcgttcgtccccacgccaccgcggccacgtctcgggggtcagaatggcatacctgagggcggagggctggggtgtgggagtgctcatagcagacaggcctggctgggcgttctgatgaaggggatggcgagggcgggggtggagggctcctcacctctgcaggaatttggcgaactggcggcggtaggcgaagccggctctgcgcaccctgatgttctccttcaggcccaggtattccacctggtgcttgactctggtggggagggtaggctgagtcccctcggggtggggagtcaccagtcctgggggtgggtgggaggtgctggaggtgggggacctggggggatctggattcatgctgagggaagtttggggggtgagttctgtggtctgggggggcttcgggggtcagcctggggactggggggagggatcttgtcctgatggtcccttctggggtcagttctgcaggtgggggattgtgggaggggctgtgctagtccctgggtcatcctacaggaggtcagggaggtgtctcggtcagttctaggggtaactgcagggcctggggggaatgaatcttggattggttgggggggatcacctgttctcctcccagtctcggggcctcttggtctcgttgggtttgatgcagcggatgtagtggggtgtgcacctcatcagtgtggccaccaggtcgttggcttgtttctgaggcagaagtgaagacgggtgggtggggggcacagagatgggaccctctggcccctcttttttccaccctggatacagtcccaatagacagagactgggggtgggtgagggctggtaacagataagccacaggggccagatgtccctggtctgtgtgcacctccactagtgcacaccacactagtgggactgatgtggggtgtctgcctgaccctggaacccaagacaaggagctctcacgtctaccgcactcaccacttaccttggcacatagtaagtgctcagtaaatgtttgttgactgagtaacagagcccttatgagagcatttctttttgtcctttggggagataggtaccttgggtgtttgttttttttgttttgttctgttttattttgttttgagatggaattttgctctgtcacccaggctggagcgcaatggtgccatcttggctcactgcaacctccaccacctggatccaagagatccttctgcctcagcctcccaagtagctgggattacaggcatgtgccaccacacccggataatttttagtagagacagggttttgccatgttggtcaggctggtcatgaactcctgacctcaggtgatccatccacctctggctcccaaggtgttgggattacaggcatgagccactatacctggctgggtgattttttttgagacagggtctccctctgtcactcaggctggggtatagtggcgccgtgatagttcactgtagcctcagcctcctgtgctcaagcgatcaactgccttagcctccggagtagctaggattacaggtctgagccactgtgcctggctaagacatgtactttggaggtagggaaactgtgtgtatgcctgagaggtttgccttgggttttgcattttgttttatttttatttttatttttatttggagacaaaatctcgctctgttgccaggctggagtgcagtggcatgatctcggctcactgcaacctccgtctcccaggttcaagtgattctcccacctcagccttccgagtagctgccaccacacccagctcctttttttttatatatatatttttagtagagacggggtttcaccatgttggctgggctggtcttcaactcctgacctcaggtgatccacctgcctcagcctcccaaagtcctgggattacaggcttgagccactgtgcctggcttgcatttttattttattttattttagtatttatttattaatttatctgagacagggtcttgctctgtcatccaggctggagtgcagtggctcttggctcactgcaacctccatctcccaagttcaagcaattctcctgcctcagcctcctgagtagctgggattacaggcatatgctggctaaattttgtatttttagtagagatgggctttcaccatgttggccaggctggtcttgaaatcctgacttcaagtgatctgcccgattcagcctctgaaagtgctgggattacaggtgtgagccattgctcccggtctgattttttttttttttttttttaagagacagggtctcactctgttcccaggctaaagtgccagggtgcaatcatggttcactgcagcctcgacctcctgggctcaaatgatcctcctgcctcagcctcccaagtagctgggaccacaggtgtgcactactatgcttggctaatttttaatttattttttatagagacggggtcttgttttgttgcccagactagatttgttgtcacattcatagcaacagaatggtgagtgccagggacttggaaagcagataggcagtgtttcctggggacacagtttcagtttgggaagatgagaaagttctggagatgggtagtggtgatggttgcacaaccatatgaatgcacttaataccactgaacattaaaactggttaaaatattattagataggctgggtacagtggctcacgcctgtaatcccagcactttgggaggctgaggtgggcggatcacctggggtcaggagaccagcctggcccacatggtgaaaccccatctctactgaaaatacaaaattaggccgagcgcggtggctcacacctgtaatcccagcgctttgggaggctgaggcaggcggatcacctgaggtcgggagttcgagaatagcctggccaacatggtgaaaccctgtctctactgaaaatacaaaattagccgggcatggtggtgcatgcctgtaatcccagctacttgggaggctgaggcaggagaatcacttgaacccaagaggcagaggttgtggtgagccgagatcacgccattgcactccagcctaggcaacaagagtgaaactccatctcaaaaaaaaaaccaaaccaacaaaaaaacaaaattagctgggtgtggtggcgcatgcttgtaatcccagctacttaggaggctgaggcagaagaatcacttgaacccaggaggcggaggttgcagagggcccagattgtgccactgcactccatcctgggtgacagagcaagactctgtctcaaaaaaaaaaattattggatattattaagatgataaattttatgtcatgtatattttaccacaaatttaaaaaatggtaaatgactaaagaccaaacaaaaatgtattagaataatggtctacttctgcattgaaggagttgatggagacctccaagaagctggttcaagctccctaaacccagagctggaggaagaccctgctgaacagatgacgtcacagtcagaggcagaagccccaggattggtagacagacagacgttggaatgagagaaacagagtccggaccccaggtagggtggaactcagccctctgcaggcccagctccccgttgtacaccccaggcccaccttgatcttggagccggcggtgctggggcgccccttcttgtctccatccagcttctcggggaagagcatccggaggaaggccctgggtaggaaaggggagaggaggagttggaggtatggctagactttcgggtactcttcctccaggggtggggcagcctcaatgccgcaacgcaaaatatggttctctcaatgtggaggggagctgtgatgggtgagatgcagagggttggttttttggtttgttttttgaggcagggcctcgctttgtcctccaggttggggcgcattggtgcgatgataggaactgcagcctggaactcctgggctcaagccaatgtgtgaatgtattgaatgccactgaattgtacatttcatttcattttatcttattttatttatttatttatttcctttattttttctttgtcacaaaaagggaacaacacggataaattgtacattttaaaatggttaataaggccgggtgcggtggtgcatgcctgtaatcccagcactttgggaggctgaggcaggtggatcacctgaagtcaggagtttgagacaagcctgaccaacatggtgaaaccctgtctctactaaaaatacaaaaattagcggggcatgatggtgggcgtctataatcccagctactcgggaggctgaggcaggagaatcgcttgaacccaggaggtggaggttgcagtgagccgagatcgtgccactgcactccagcctgggcggcagggtgagagacactgtctccaaaaaaaaaaaaaaaaaatcggattgtggtgatggttgcgcaattctgtgaatttgctaaacgtcatggattgagacactgcttaaagtgggtggatttaatggtaagtgctgctgaaacccttacgtgcacatggatccctgggaggcatgggtgcatcctggcttaaagatcaggttaggttccgatagttctaaacctgattgttcagattctgatagttcagaatcagatgcagattctgattctggaggtctggggtggagtttgaggttctgccttttttttcccctcagagataaggtctgttgccaaggctggagtgcagtggtgcaatcacggctcactgtagcctccacctcctaggctcaagtgatccttctatctcagcctcccgagtagctgggactataggcatgtgccaccacacccagctaattaattaattattattatttttgctggcagagtagacaagcatttaaaaaaaagaatttttttttaagagacaggggtcttgctatgttgcccaggctggtcttaaacttgggacctccagtgatccttctggctagggagattctgcactggaaacaaggcccaaggatgctcaggttgctggtctaagaaccacatgtcaaacactttaaggatccccgtcttattactttacatctaatgctatgttctttgtgtgtgtgtgtgtgtgtgtgtttttttttttttttttttttgagacagaatctccctctgtcgcccaggctggagtgcagtggcacaatcttggctcattgcaacctctgcctcctgggttcaagagattcttatgcttccacctcctgagtagctggaattacaggtgcgcgccaccacgcctaggtaatttttataattttagtagagacaaggttttgccatgttgcccaggctggtctcaaactcttggcctcaagagatttgtccacttcggcctcccaaagtgctgggattacaggcgtgagccactgcgcccggcctctggagttactttttacatcagaactagtccatagaaacaccatcctggccgcacagccactcccctcgagtttgtggcgagatggcagttctgggtaagatggagtggggcccggtcctccctccatccccttggggggttgtagccggaggtccccatgcctgggaccactcactgctcactggtctgcatcagctctatgaggtcggagaagagaacgtctcggttcctctcgcagaagccgctgacgtcgtaggagacctggaggggacagtgctgaggacagtgagggactgagaaacctggctgggagggtgggcgtggggtgcttacagcccaggtggtcaaggctttcctggggcctgctgtggggtgagaggatcaggcagtgtctacagcgctggctggggggtatctacagttcagaataggggatggggggcgggcttcctggagagctgatgttcaagttgaggttagaggatcgtggctgtatcccaggtcagaggtaaggggaggtgggggttacaacctagatgagccaggagagagctgcagcttgcatcagaggccggggggcggtgaaagttatagctcagattggtgggtggggggctgcagcctggcgggggggtccctgggagtcagaggtcagattggatatctgtgacctggtcaatcaggggccagtgcagggggcctgtgtcaggagggtaacagccctgtctcagggatctctgggggcatttcagccagggttgggggctggagctgctaccaaaggttagggccctctgtagttctgagcagggcttttgcaaccctggctgagggaacatgggagctccagccgtttttgtttttgtttgtttgcttttttttttttttgagaaagagtcttgctctatcacccaggctggagtgcaatgacacgatctcagctcactgcaacctccgccttccgggatcaagtgattctcctgtctcagcctcccgatgagctgggattacaggcgtgtgccaccacacctggctgatttttttttttatttttaatagagacggggtttcaatatgttagccaggatggtctcgatctcctgaccttgtgatccgcccgcctcagcctcccaaagtgctgggattataggcgtgagccactgcacccggccctgtttgcttttgttttgtgagatggagtcttgctctgttgctcaggctggagtgctgtggcacaatcttggcttactgcaacctccacctcttggattcaagtgattctcctgcctcagcctcctgagtagctgggattacaggtgcccacgaccacgcccggctgatttttgtatttttagtagagactgggtttcaccatgttggccaggctggtcttgaactcctgacctcaggtgatccacccgcctcagcctcccaaagtgctgggattacaggcgtgagccaccactcccagcctctccagcccattttaggggcactcctaggaacttctgctctcatgttgtgagatccttggatcactgcctgagagtgtagtcctgtcttttggggagtggggctgcgggcatggttagagtccagtggatttctgtagccttcggtaggggtctgtaggaggcttcagcacattttgaaggctggtggctcacaggaggggcctgggggctttggggatttcctctccaaattgggatcagaaggtggggggctgtgtcctagtcagggggttatgactcacattggggcttatctgaacataggcagtctggtacccaagctggtgttaatcggggggaattctgttccctctgttaggggagttgatgtgtaagggaagctgtggcctggatcagaggtcagggtttctgcagccctggcccagggaacacggtggtggtggtggtgctggtggtggtggtggtggtgctggtggtggtggtggtggtggtggtggtggtgctggtggtggtggtggtgctggtggtgctggtggtgctggtggtggtggtggtggtggtgctggtggtgctggtggtgctggtggtggtggtgctggtggtgctggtggtggtggtggtggtggtggtggtggtggtggtggtggtggtgctggtggtgctggtggtgctggtggtggtggtggtggtgctggtggtggtggtggtggtggtggtggtggtggtggtggtgctggtggtgctggtggtggtggtggtggtggtgctggtgctggtgctggtggtggtgctggtggtggcggtggcggtggcggtggcggtggcggtggcggtgctggtggtggtggtggtggtggtggtggtgtccagacaagtttggggcttagagagttcctggggggtcagccggaagggtctgtagttctggttagtagggggtggattgaggcgggggacagtggaattctacagccctggataagggtcctagcaggctctttccagcctgggtgctggagggtgggggctacagcctggagccctgggggtctgcgaggaggcacagggtagggtaggggcagggggcgcaccttgccagcgtagtggtggatgacgaagccggcgctccagctgttgaaatgctcgtgggtccccacagccgcctgcagcttctgcagcagtgtctggtctgctcccccgcccgtggcgtgcatggtggcgcacacgtcgtccaagacgctcatgatgcctggggggctctgcggggcgagcgggagccagcagcggctcagtttggtctgccttgcctccccacagctcgtcagtgcagagattaggggagggagggggtggaggagtggagggagctagagctttgggggtggggagggcaccaggggcttcaaatacaagcacaaaaggcgttgcaggggtcagggatggaagggataggggggcaagggtgtgtggggctactgtggaagctcgctgaggtgcagaagtgggtggggacccctcaagagattcaggccccagactagaatcccttggtagggggacctgccttatgtatttatttatttatttagagacggagtcttgctctcttgcccaggctggagagcagtggcgtgatctcagctcactgcagcctccatctcccaggttcgagtgattctcctgcttcagcctcctgagtagctgggattacaggcatgccgccaccatgcccggctaatttttgtattttttagtagagatggggtttcaccatgttggccaggctggtttcgaactcttggcctcaggtgatccacctgccttggcctcccaaagtgctgggattacaggcatgagccaccatgtcccgcctaaatacgtcttaaatttaattttttttgagacagggtcttgttctgttcctcaggctggagtgtggtggtgcaatcatagctcactgcacccttgacttcctgggctcaagtgatcctcccacctcagccttccgggtagctgggattacaggcgcctgccaccacgcctggctaattttttgtatttttagtagagacaggttttcaccatattggtcaggctggtctcgaactcctgacctcaggtgatccgcccaccttggcctcccaaagtgctgggattacaggcgtgagccaccggcatggaatctgcaaatttgactctaactgtgagctggggttcccggggaaatgtttattgaatgattaagtgaaaggtggacaagtaggcggaatgaatggatgaggggcggaagggacattttggttgttatctgtcgctggaagtcctgagtgtagggtagagaagggcctgaggatgccataacacccttggccctccccctcatcttccagactcagctcaggggaccagtgagacgcccccgccaaagttgacccagccctcaccagcttgttttcgatgaggtcacagacgaccttgttgttgaagtactggattggagtccagcggatgccttcctgcacatactcctcctggggtggaaaagggggtggatgtgggggccagtgaaaaagttgtggccacccttccccccatgtcctctccccttctccatctcatcacttaggactgtctctggtaacaaagcccgtcactcctatgtgggcaaggctggaagtgccagggaattacatctggtttcagcagtccttgaccaataatcaacaggagtgggtggataaataccccagctccctcgcttctccgctctatgaagcctcctcgagtcccagtgcagttgcattccggttgtccacagcataacgtgctcattaacacactattttgactctttttttttttttttttttttttttgagatggagtttcactcctgttgcctaggctggagtgcaatggcacgatcttggctcatcgcaacctccgcctcccgagttcaagcgattctcctgcctcagcctcccgagaagctgggattacaggtatgtgccaccacgccggactaattttgtatttttagtagagatggggtttctccatgttggtcaggctggtctcgaactcccaacctcaggacatctgcccacctcggcctcccaaagtgctgggattacaggcatgagccaccgcacacagcttgctttttttttttgagaccgggttttgctctgttacccaggctggaactcagcgatgcgatcctagctcactgcaaccttgacctccagggttcaagtgatcctctcatctcagccttccgagtagctgggaccgtaggagcacaccaccatgcctggctaatttttatgttttttgtagagatgaggtctcactatgttgtccaggctggctttgaacccccaggctcaagcgatcctcttaacttagcctcctagatagctgggactataggtgtgagtgattgtgtctggctcggtctgtctctctctttttttcttttcttttttgagacagggtctcattctgctgttgcccaggctggagtgcaatggcacaatctcgactcactacaagctctgcctcctgggttcaagcaattctcctgcctcagactcctgagtagctgggattacaggtgcccagcaccacacctggctaagttttatatttttagtagagatggggtttcaccatgttggccaggctggtctcaaactcctgacctcaggtgatccacccacctcagcctcccaaagtgctgggattacaggcgtgagccactgcacccagcctctctctctctctttgttaaaaaaatccctgtctcaggactgggcatattaactcatgcctgtagtcccagcactttggcaggccaaggcaggaggattgcttgaggccaggagttcaagaccaatctgggcaacaaagtgaaacaccaactctacaaaaaagttttaaaatattagccaggcatgatggtgtgtgcctgcggtcccagctacttgagaggctgaagtgggaggattgcttgagcccaggaggtgtagactgcagtgacctgtgatcacaccactgcactccagcctggacaacagagcgagttcctgtctcaaaaaaaaaaaaaaaaaaaaaaaagcggggaatggtggctcccatctgtaatcccagcactttgggaggctgaggtgggtggatcacgaggtcaggagtttgagaccagtctggccaatatgatgaaaccctgtctctactaaaaatacaaaaattagctgggcatggtggtgggtgcctgtagtcccagctgctcgggaggctgaggcaggagaatcacttgaactctggaggcggaggttgcagtgagccgagatcatgccactgcactccagcctgggtgacagaacgagactttgtctcaaaaaaaaaaaaaaaaatccctgacttacttcctcagtctcctcttggagcttcctgggattgcctcccagaaaaaccatttgtctctgaatccttgcctcaggctctgcttctgggggaggggcaaaatgaagacagcagggactattgccttattgttcatggctgtgtctccaagcaccctaaacagtacctggcacacaacaggtgctcaataaataattgctgaatgaatgaactaagaggcacggtccttcccaaagctttagaggcagaaggaagtatcactatggagcctgggtaggttggcacagagaggtgggaacgcggtggggagggctggggtgtcccctagttgctaagggatcctcatggtccttccaccccacccccaccccaggatcccccatccctgactgcttggccgcccacctgctcggccttcagggtaagttcgataaagatttgctgcagcttctcattgacgaagttgatgcaaaactgctcgaagccatttttctgcagaaggaggaaaagggtccttccctcaatgtcctggtgctggaagttcttgtggccaccctgggctgccccagggaggacaggatgtgggctggaggcagggggccgtacctggaagatctcgaagccgtaaatgtccagcacaccgatgctgtactcttcctggggtttctgcatagcacggttgatggcctgcggtgtgggtggggacaggaagtcagtgggcatcggtcagatctgaagcccctgcccaccactccttagacacacgcctagccaacttcatgggtgatgtcccctcatgccagtttccctccagccctctttagctctgcccttcctggctctgtgtacagtctccccaccccataatcagtcactcagaggagaaacccaagtgtcagtgtatcagggtccctgactccagagctgactctgcccctgaacctctctgcacctctattttctttttttttttttcttttttttttttgagacggagtctcactctgtcgcccaggctggagtgcagtggcatgatctcggctcactgcaagctccgcctccagggttcacaccattctcctgcctcagcctcccaagtagctggaactacaagggcctgccaccacgcccggctaattttttgtatttttagtagagacggggtttcactgtggtctcgatctcctgacctcgtgatccgcccgcctcggcctcccaaagtgccgggattacaggtgtgagccactgcgcccggccttgcacctctattttcttatctttaaaaggggttgataatagcaactaccttatggggctttttcttttctattttttttgagatggagtctcattctgttgcccaggctggaatgccagtggcgcaatctcggctcactgaaacctctgcctccaggattcaagagattcttctgcctcagcctcccaagtagctgggattacaggcatgcgccaccacgcccggctaattcttgtatttttagtagagacggggttttgccatgctggccagggctgatcttgaactcctgaccttgggtgatctgcccgctttgacctcccaaagtgctgggattacaggcatgagccactgcacctggccatacattttatactttatttatttttattttttattttgagacagggtctcagtctgttgtccaggctggagtgtagtggcttgatcatggctcactacagcctcaacctcctggggtcagggattcttccacctcagcctcctgagtagccgggattacaggcaccagccaccatgcccggctaatttttgtatttttgtagagacagggttttgccatgttgcccaggctgactccatacattaaaaaagtttttattttatttatttatttattttgagacagagtctctctctgttgcccaggctggaatacaatagcacgatctcagctcactgcaacctccacctcccaggttcaagtgattctcctccctcagcctcccaagtagctgggattaaaggcatgtgccaccactcccgggtaatttttagtagagagggggtttcaccatgttggccaggctggtctcaaactccagacctcaagtgatccatccacctcagcctcccaaagtgctgggattacaggcatgagccactgcatctggccaaaagttttttttagagacagggtcttgctctgtcacccaggctggagtacaatagcgcaatcatagctcactgcagccccaacctcctgggttcaaatgatcccccaacctcagccctctgagtagccagaactacacatgcacaccactacacccaactaatttgaaatttctgtagagatgggggtcttgctatgttgcccaggctggtcttgaacttctggcctcaaagaatgctcccaactcagccacccaaagcattgggattgcagccgtgagccactgcactcagcttccataaatgtttgtgaccccagagcatccactctgccttccagccccagccccactcgcctccacgaggaagtcgaagaggcgggcatagagccccttggccagggcatcacgggtgtaggctgcctgctccacgttgagggtcacattgatggactcgctgcgcccgccccagcggctgtccatcttgcggctggtcagcttctcctgcagtcgcccgctgtcaatgcccagcaggtaggcgggaaaggccaggactaccagggcaaaggtcagggcaaaaatgggacagttggttgggctcttgtgcctcctgcatgggcctcctattatccccatcttgcccagtgacacccacatttttttcctcgtgggctttcagcttcctgggggctgagctaggaggacgcagttcacccacccacaggcctccatccagccctccctgatacccacactcacggtccacactctccactcgggcgtaattcccgtcttcacagaaactgatgttccccaggtgcaagatccccgccacgagctgcaggaccagctgctggatgctgggcgggatcccaataacctgcatagcactctgtggtacaacgggggcagaaactgtgccgtgaatcctggcctccaacctgcctccaggggcaggcttgagggaccacagcacggactcagggagtgagcacccttgggtccctgtcctacccctttcagtcacttgccgcgtgaccttgggtaagtgcctgcacctctctgggctttgttttttattatattttttatttttgagacagagtctccctctgttgcccaggctggagtgcagtggtatgatcttggctcactgcaacctcctcatcccaggttcaagcgattttcctgcctccgcctcccgagtagctgggattacaggcgtgagcgtcgtgtccggactgggctttggtttcctatttttttttttttagagtctcactctttcacccaggcgggagtgcagcggcgctatcttggctcactgcaacctccacctcccgggtttaagcgattctcctgcctcagcctccctagtagctgggactacaggcgcatggcatcatacccggctaatctttgtattcttaataaagatggggtttcactatgttggccaggctggtcttgaactcctgacctcaggtgatctacctgcctcggcctcccaaagtgctgggattacaggtgtgagccaccgtgcctggccttttttttttttttttttgagatgtagtctcactctgttgcccaggctggagtgcagtagtgtgatctcggctcactgcaacttccacctcccgttttcaagcaattttcctgcctctgcctccccagtagctgggattacagtcacacgccaccacatctggctaatttttgtattttaagtagagacggggtttaaccacgttggccaggccggtcttaaactcctgaccttaagtgatctacctgcctcggcctcccaaagtgctgggattacaggcttgagccacatgcctggcctgggcttcggtttcctaatttgtaactcaggagggtttctggggctgaggtctgcctggccggggactggagtagaggccggtgctcaccagagtctcaccaaagtcgcttctgtcgtccgtgccgtccacctggtaggtgtccgattggttgaggtagtaatagtagtccggtgtcatgaggcccaggttctgcctttgctcctgggaggccccttccagcagctggagggtgtgccatgttcatgcatctggtgcttgcctggctcagcccctgtgatccctcatctgccctgccatgcccccctaggtgtttaccttcccattgtccaccccgctgggctccaggtggtgctccctctcccccggccccttccctgcacctggtagtagatgtggaagttcctctcattttcattttgcatgaccacgcgggacttctccagcaagaagttggagatcttgcccccatctggctccccacctcggctgaactggatctcaaagtacttgccctgaatccgagagaaccatgtcagcaccccagtgtcctggggtgcaggtgggggaagggttggggatgggtcttatgagccttgcctctcttcccttcttccttttttttttgagacagaatctgactctgttgctcaggctgggattcagtggcgcaatgtcggctcactgcaacgtccacctcctgggttcaagtgattctcctgccttagcctcctgagtagctgggactacaggcacccgccaccatgcccagctaatttttgtatttttggcagagctaatttttgtatttttcatcatgttggccaggctggtcttgaactccagacctcaagtgatccgcctgtctcagcctcccaaagtgctgggatttcagatgtgagcccccacacccagcccaagggtatggaatttattaaaccatgtccatgtgcaggtgtaatactgaagtctatgagatggatattaacatcgtcaccattttatggatgagcaaacagaggaaactcaggaagttgcatagatttttttcccccccaggctacacagctcacagtgatagaatcaaaccctgaatccatatctgtttacctatcctgactttcactgggcccagcgcagcacccacacaaagaacgagtcccagaactattgtcgaaagaaggaatggatgagggaataaattggacctgaaatgtgaatgggaacaatgtagcatggctgcagccgggggagcatttaagaatgttacacaggggtgtcatggcctccacagttctgccaatgggggactctcttttgaaagggaccatgagcaggaagtgagtctccccttcaggagtaggtatttcctgctgggttttcaatggactcttgtcttggcaatacgggtgtgtgtatgtgtgggtgtgtgtgtagaaaggtcagcacggagggagcagctgctccaagcaggtctgcagagacttacaaagcggctggaattgttgttgcgcacagtcttggcgttgccgaaggcctcgagcagcgggttggactgcaggatgatatctttgacgtgctggggcagaggcaggtggagtgggaagaagtcagactgaggcaggagtgcagatgggtggggctgcactaccatgcaggtgagggcgacccagcttatccttctgttttcctcgtctcacctggaccttctcgcctccgccagacaccttggagatgtagcccatgatatatttggctgccactgtcttcccagctccactctctccactggggatgaatggaggaataaatgatcagtggttggggaagagccctttttagtgcctgaccattcattcattgagcacctactgtgtgcctgccagtattccgggtactggggatactgtaatgaacaagacagataaaatctctgctctcagccgggcatggtggctcctgcctgtaatcccagcactttgggagcctgaggagggcggatcacttgaggtcaaaagttagagaccagcctggccaacatggtgaaacccagtctctactaaaatacaaaaattagccggacatggtggtgggcgcctgtaatcccggccactcaggaggctgaggcaggagaattgcttgaacctgggaggcagaggttgcagtgagctgaggttgtgccactgcactccagcctgggtgacagactgagactctgtcacacacacacacacacacacacacactctctctctctctctctctctctctctcgctctctttctctctctctgctctcatagagctggcatcgattgattgactgagatggggtctcactctgttgcccaggctggagtgcagtggtgtgatcatagcacctgttcctgcctggaactcctgggctcaagcaatcctccctcctcagcctcttgagtagctggggactacaggcgtgcaccaccgtgtccggctaattattatctatacagagacaggatgttgccatattgcccaggctggtcttgaactcctagcctcaagagatcctctcgccttggcctcccaaagtgccaggattacaagcatgagccactacacctggcctgaggtgacatttagaggggacagacagacaatagcagaatgaatcaataaaatacatcgtgagtcagatggtgacaaggaaaataaaacagagtgagggcagagagggacagcagggcaatgttcagattgggagtttcaggcaaacctccctgggggtggtgatgtttcagcaggggcccgggcagcagggtctgtggccccccaactctgtccatacctaatgatgacacactggttctcacagtcgataagcatgttccggtacatgttgtccgtgagggcgtagatgtgcgggggattctcatactgggcctggcaggggaggtcaggtctcagcccagggctgggggccaggagtctgggggctgtgcctcccacccagccccagcctcaccgcgccctgatagaggtcgatctcacggtcggtgaagtagggcatctgcttgaaggggtttacagagatgagcacagagccgatgtaggtctgagggatggttaagggtcgtgtggtgtcctggtaggttttgtcctccctgtcccctcatcctgcccccacccagggcttcctaaaactccattgcttggaggtggaagagatggagataatggatgcacctcgagtctcttggaaaaaacagggctggccgggcgcggtggctcatgcctgtaatcccagcactttggaaggccgaggcaggcggatcacttgaggtcaggagtttgagaccagcctggccaacatggtgaaaccttgtctccactaataatacaaaaaattacccgggcatggtggtgcatgcctgtaatcccggctacttgggaggctgagggaggagaatcgcttgaacctgggaggcagaggttgcagcgagctatcgtgccattgcactccagcctgggcaacaagagccactcagtctcaaaaacaaaacacaaaacacaaaaagcaaaaacaaaaaaattagccaggcatggtggcgcatgcctataatcccagctacttgggaggctgaggcaggagaatcatttgaatccgggaggtggaggttgcagtgagctgagattgtgccactacactccagcctggaacctgggcgacagagcaagactccgtctcaaaaaaaaaaaaaaaaaaaaaaaaaaaaaagaacaaacagggttggatccggaatgggggaaatggaacacgctggggctgagcttccccaggacagagggagcagtggcagccacagctgcccccaaccagagccctgctgtcactctgtctgtcctctgtgtcaccacttggtgctctcccggcccattcctccctctgctccttcaccctcctctccgtccatggcccagccattcattccttccctgcctgcccacccccagccttggcccagggtacgaagatgtagtcgtccatgaagcgcttccggaggttggcggcaatggcgtcttcggtgatctggggaagaagcaccatgtcatccacgccgctctgcttcacgttgtggctctgccagtggaagcgctccttgctgccctggggggtgagaggggggtcggggtgagcccttgcacggggatgcggcacctggctcaccgacgctatcagcttctgggttctgtcccacctcccccgccccacctccattcctccttccccatctccaggagaggctggcagggtccaagccaggccccctgccccagacagaagttgcactgctcggatccagccctcagccctctatttttttttaatttttaatttttatttatttatttattttgagacagagtctcactctgtcagtcaggctggggtgcagtggcgtgatctctgctcactgcaacatccacctcccgggttcaagcgattctcctgcctcagcctcccgagtagctgggattacaggtgcccaccaccatgcccggctaatttttaatatttttggtagagatggggtttcaccatgttggccaggctggtctggaactcctgacttcaagtgatccacccgcctcaggctcccaaagtgctgggattacaggcgtgagccaccgcacccggcctcttttttttttaattaaaaaattttttaatgccaagtgcagtggctcatgcccgtaatcccagcacttcgggaggttgaggcaggaggatcgcttgaggccaggagttcgagaccagcctgggcaacatagcgaggccccgtctctataaaaaaagaaagaaagaaagaaagaaagagaaagaaagagaaagaaagaaagaaatgagatctcaagccatgaaaagacatggaggaaacttaaaggcatatcactaagtgaaagaagccaatctggggccgggcacagtggctcatgcctgtaatcccagcactttgggaggccaagacgggtggatcacctgaggacgagagttcgagaccagtctgatcaatatggagaaaccccgtctatactaaaaatacaaaattagccaggtgtgctggcacatgcctgttatcccagctactcgggaggctgaggcaggagaatcgcttgaacctgggagacagaggttgcagtgagccgagattgtgccattgcactccagccttggcaacaagagtgaaactctgtctcaaaaaaaaaaaaaaaaaaaaaaaggaagccaatctgaaaaggctatttactgtcttattccaactataggatattctggaaaaggcaaaactatgaggacagtaaaagatcagtggggccagacgcaatggctcacacctgtaatcccagcactttgggaggccgaggcgggaggactgcttaaggccagcagttcaagaccagcctgggcaacatagtgagacccccatctctacaaaaaatagaaaaattagacgagtggtggcatgtgtctgtgatcatagctactctggaagctgaggtgggaggatcacttgagcccaggatgtggaggttgcagtgagctgatatttcgccactacactccatcctggatgactctgtctcaaaaaaaacaaacaaccaaacaaacaacaaaaaaagttttgagacagggtctcactctgtcacccaggctggagtgcagtggtgtgatcacagctccatgcagcctcaacctcctgggctcaagcaatccttccaccacaccacagcctcctgggtagctgggactacagacgtgcaccaccatgcctggataatttttgtatttttttgtagagatggggtcttgctatgttgccctggctggtcttgaactcctgggctgaatggattatctgtctcagtcccccaaagtggtgggattataggcgtaagctactgcacccagcccctcagccctctcctttggtctctctttccatctgtcactccacctagtacccctcacttcccatgaaggatgccaggcttggcgggcagggcacagagtgcttggggttctgcaggctgtaggagcagagcagggagaccgggtgacttggtgggaagtgggcgcatcccagttctcacttcctgccagcctcccagcctctccctttcacatcccccgtcccctccccaggcccaggccagtccctgacttctctgtggcatttgatccactgctgccaggccccttccttctccctcctacctctcctcttctcttgtggtcacacataccagctggtccctttgagctcctccaggccaccatgtgctgtgacctctgccctctgtgcctgtgtatgactttgttcctcagctctaccctctactcccagccctgcctccctgctgcccctgccgtggccttctcctctgtgtcccttcaccttgcccctcagcagtgccagcaccttcttaggttgccatttttttcatttcatttcctctctcagtttttctttttcttttctttttttcttttgagtcagagtcttgttctgtcacccaggctggagtgcagtggcgggatcatagctcactgtagccctgaccttctgggctcaagagatcctcccacctcagcctcctgagtagctgggaccacaggtgtgtgccaccatgcccagctaatatttaaattttttttgtattgatggggtcttgctctgttgctcaggctggtctttaacttctggcctcaagtgatcctcccacctcagcctcccaaagtgctggaatttcaggcatgagacaccttgcctgacccagacgacactttctttaggccccatggaggagactgaggcacatgctctccaaaatctcctcttccaggaagcctgccctggttgctctccttttagcccgactgaatttatctagtgccttaaacaccctggctttctcaggctcactctgtctctattcaacacatctctgcaaaggagtagtctgacagataggagtgatggcaacttggagctaccccatttggtgaactgatggtcagataagatgtctctcctcctggaagccccccatccccaggccaggagctcctggagacagagactggggctgagtcttttctctgtcaaatgaacaggggacaaaggtaaagaaagaaacccagattcagagcaaaaaccaccagagcaaacaaagctgggaattgaagtatttttgtatttttgagatggggtctcactgctttgcccaggctggatggagtgcagtggtgagaccacggctcactgctacctctgcctgcggggctcaagcgagcctgtcacctcggcctcctgagtagctggcactacaggcacacaccactaagcccagctaattttttgtatttttggtagagacggggtttcactgtgttgctcaggctggtcttgaactcctgagttcaagcgaccttcctgcctcgatcttccaaactgctgggattacaggcatgagccaccgctcccagcccaggattgaagtctttaaagtggactgtgtttgccagtggattccagggatacaggcagggcacaagcagaagtgtccacgtgggcaactgtaaggcagaagtggagccagtctctcctgggggtactggggagccacggaatgttcttgagggggtggggggtggggggtgggggtggaggtgcatgatcagattctggacatactgacagttagaggttgttgagggatgcccatgggcattaaataagcccagcctttggcataagggtagatctgggttctgatcctgactgggcaaacagatgctgctgtgagtctccatcgtctcatctataaaaaggaagaggcagctccacttcccagggttgatgagaggatgaactactctgggggaacaaggtgggatgggaggctggtgcccctccccaagcctgagtggtcgtgaggatagaccgaggctgaggggcatttgaaagaattaacacgaccgggcgcggtggctcacacctgcaatcccagcactttgggaggccgaggcggggagatcatctaaggtcgggagtttgagaccagcctgaccaacatggtgaaactccatctctactaaaaatacaaaaattagctgggcgtggtggcgcacgcctgtaatcccagctactcgggaggctgaggcaggagaatcgctagaacccaggaggcggaggttgcggtgagcccagattgtgccattgcactccagcctgggcaacaagagcaaaactccatctcagaaaaaaaaaaaaaaaaaaagtaaagaattaacactcagcgagcacctatgctgtgcctggtttgggggatgtagatggttgatactggcagccatcatcacaccatctcagtgtgggtaggctcgaagggaaacggaggctggagaagtacagcagcttccttaaggacacgggactaaagatacaggtattgtttccaagggtgtggggtttgaacctgggtctattcaacagcaaagaacaggttcttggctgggcgcggtggctcacgcctgtaatcccagcactttgggaggctgaggcgggcggatcatgaggtcaggagatcgagaccatcctggctaacatggtgaaaccccatctctactaaaaatacaaaaaaagtagccgggtgtgggggtgcgcgcctgtaatcccagctactcaggaggctgaggcaggagactcgcttgatcccgggaggcagaggttgcagtgagccgagattgcaccattgcactccaacctgggcaaacatagcgagacttggtcttaaaaaaaggaaaaaaaaaaaagaacaggttcttgcctctgtctacacgcacaggaggctgggctggtgctgagaaggatttttttgttttgttttggtttggtttttgagacagggtctcactctgtctcccaggctggagtgcagtggcaaggtcatggctcactgcagccttgacctcctgggctcaagtgatcctcctggtctcagcctcctgtgtagctgagactacaggcacatgccaccacgcctggctaattttttttttttttgagacagagtcttgctctgtcgcccaggctggagcgcagtggcacgatctcggctcactgcaagctctgtctcctgtgttcacgccattctcctgcctcagcctcccgagtagctgggactacaggcgcccgccaccacggcggctaattttttgtatttttggtagagacggggtttcactgtattagccaggatggtctcaatctcctgaccttgtgatctgcccgcctcggcctcccaaagtgctgggattataggtgtgagccactgcgcctggccacgcctggctaatttttaaatatttcatagagacatggtcttgctctgttgctcaggctgatgtctataactcctgggctcaagtgatcctcccaccttggccttccaaaatgctgggattacaggtgtgagccactgtgcctggcctgagaagggttttgataaacagctgggagaaagggtgcaccagtcagggttaactgtctggggaaaggtgtggaggtgtggctgcagcagggacagagaatggaatgcaggggtagtcagggcttcaacccctcacactgctcctggcctgagtagtcagcatgaattccctccctccctccctccctccctcccttccccccttctttccttccttcctttctcctctccctcccttcctttctcctctccctcccttccttcctccctctctccctctctctctctttctttttctctttctttcgttctctttcttctctctcattcttctctctttctctcttctttcttcctctttctttccctccctcccctcctctccctccttccttccttccctccctccctctcttctcttttttctttctctctttctttcttctttctttccttctttccttccattttttctttccttctttcctttcttcccttcccttttccttccttccttcctcctttttttctatctttttttttgtttgtttgagatggagtctcgctctgttggccaggctggagtgtagtggcgcgatcttggctcactgcaaaatctacctcccaggttcaaacgattcttctgcctcagcctcccgggcagctgggactataggcgcgcaccaccacacccggctaatttttgtatttttagtagagataaggtttcaccatattggccaggctggtcttgaactcctgacctcgtgatccacccatgtcggcctcccaaagtgctgggattacaggcatgagccactgcgtctggcccttccttcctttttctttttttttcttttgttttttttgagatggagtcttgctctgtcgcccaggctgaagggcagtggcacaatctcggctcactgcaagcctcgcctccagggttcacgccgttctcctgcccggctaattttttctttttttttttgtatttttagtggagacgaggtttcaccgtgttagccaggatggtcttgatctcctgacctcgttacccgcccgccttggcctcacaaagcactgggattataggcatgagccaccgcaccggcccttcctttctttttcttgtcttttttgagacaagatctcactctgtcacctaggctggagtgcactggtgcgatcatacctcactgcggcctcgaactcctgggcccaagcaatcctcctgccttgacctcctgagtagctgggcctatgggtggaagccactgggcccagctgggagattttagttttgttcagtgtgctaagagctcaacactttgtttattttaaaaatttatttacttatttatttttttgaggcagggtcttgctctgttgcccaggctggagtgcagtggtgtaatcatagctaactgtagccttgacgtccaggctcaagtgatcctcccaccccagcctcctgagtagctgggaccacaggcaagtaccactgtgcccagctacttaaattttttttttacagatggggtctccctatgttgcccaggctggtctctaactcctgggctcaagcaatcctcctgcctcagtctcccagagtgccaggattacaggcatgagccatggtgcctggccaagttaaacattttggaaactcacttcgttgaaagtcatgccggtggtggcgttaaaaatgacctgtaggtgggactgtcatacttgtttacaggtgggagcacctggtggctctcctgggccttcttggaccgctgaccttagcaccttctttccttctttcctttttttgttttgataccgagtctcactctgtcgcccaggctggagtgcagtggtttgatcgcagctcactgtaacctctgcctcccgggtccaagtgattgtcctgtctcagcctcccgagtagctgggactacaggcacctgccaccatgcctggctaattttttgtatttttagtatggatggggtttcaccatgttggtcaggctggtcttgaactcctgacctcaggtgatccacccgcctcggcctcccaaaatgctgggattataggcatgagccactgtgcttggccactttttttttttttttttttttgagacacagtcttgctctatcgcccaggctggagtgcagtggtgagatctcagctcactgcaacctctgcttcccggattcaagcgattctcatgcctcagcctcctgagtacctgggattataggcgtgcaccaccacgcccagctaacgttttgtaattttagtagagacaggatttttctttttctttctttctttcttttttttttgagatggagtgtctctcttgttatctgggctggagtgcaatgatgtgatctcagctcactgcaaccttcgcctcccgggttcaagcgattttcctgcctcagcctccctagtagctggggttacaggagcccatcaacacgcccagctaattttttttgtatttttagtagagatgggctttcactatgttggtcaggctggtctggaactcctgacctcaggcgatccccctgcctcagcctcccaaagtgctgggattacaggggtgagccaccgcgcctggcttgagacagggtttttctatgttggccaggctggtctcaaactcctagcctcaggtgatccacccgccttggcttctcaaagtgctgagattataggcatgagccactgcgctttggcctgaccctagcactctcatatttggacacacattttattgtaaggtcttcattacaggcaatcacattgattctttttgaaactatgggagttgagtgtgtccattgtctgaggttaatgtcgggatttaaaggaggcctaattaggtgtttttataagaagtgggtgctggccgggcatggcggctcatgcctataatcccagcactttgggaggccaaggtggatggatcacttgaggtcaggagttcgagaccagcctggccaacatggtgaaaccccgtctctactaaaaatacaaaaattagccaggcgtggtgtcaggcgcctgtaatcccagctacttgggaggctgaggcaggagaatcgcttgaacccaggaggcagaggttgcagtgagccaagatcatgccattgcacttcagcctgggcgacaggagtgaaaccctgtcttgaaaacaacaaaaaaagaaggaggtgctgactgggatgcactgagagtccctggggtgcgtcaggagatgacagaatcctggggagcagtggcatggaggggttgaagttgacacccaccacagactggctgagtaggaactgccagggaagtcagaggcaaaacccggaccaggcaggggaggcccagatgggacgagggtgggttaggagccatcgactcaaccctgaagagcgtctgagctcactggagactaagaggggccccagggtcagaagcaggattgggaggctaggaggtatagacaggaatgaggatctggctgagaaggggaagagggagagaggctgtgggggagaagtggggtcaggggagcccgtgtttcctgttttttttttgttgttgttttgagacagagtctcgctctgtcacccaggctggagtgcagtggtatgatttcggctcactgcaacctccgcctcccgggttcaagtgattctcctgcctcagcctcccaagtaactggaattacaggcgcctgccaccaagccaggctgatttttgtgtttttagtagagacaggatttcaccacgttggacacgctcatctcgaactcccaacctcaggtgatccgcccacctcagcctcccactgtgctgggattacaggcatgagccactgtgtccggccagagacagggatttcaccatgttggccaggctggtctgtaactcctgacctcaagttcaagtgatccacccacctcagcctcccaaagtgctgggagtacaggcgtgagccaccacgcctggctcatttcattttcaagatggggagaccagatggttgatgagaagagacaataaaaattgtgggcaggttgggtgcagtagctcacgcctgtaatcccagcactttgggaggttgactcgggcagatcaactgaggttgggagtttgagaccagcctgaccaacgtggggaaaccccgtctccactaaaagtacaacattagccaggtgtggtggcgagcgcctgtaatcccagctactcgggaggctgaggcaggagaatagcttgaacctgggaggcagaggttgtagtgagccaagattgtgccattgcaagctagcctgggcaacaagtgcgaaactctgtctcgaaataataataataataaaaattaaaaaataaataattgtgggcaaagtggcatcattcatgggcctagtggggcaggagcagggtcgtgagtggtgagggtctgttctttttctaaacaggtatttggggagaggctggggacaggcacagctgtgtcagtgggtggggacacgggaagtgcattttgtctctgaagagcttaagggtggagattggatggaaataacaacaatagaaaacaatgacaacaacagttaacacctggccgggtggtggctcacacctgtcatcccagcactttgggaggctgaggtggaaggatcacttgaggccaggtgtttgagaccagcctgggcaacatagtgagacccccatctctgcaaaaaaaaataaaaaataaaaaataaataaaaattagccaggcatggtggtatgcgcctgtagtcccagccactcaggaggctgaggcaagaggatcacttgagcccaggagttcggagttacagtgagctgtgattgtggcagcactccagcctggatgacagacgaagacccagaaaaaaaacccaaacaccaaactagcacttattctgtgtaccaggctccagtctatgtcttttttttttttttttttttttttgagatggagtcttgctttctcgcccaggctggagtgcagtggcatgatctcggctcactgcaagctctgcctcccgggttcacgccattctcctgcctcagcctcccatgtagctgggactacaggctcccacggccatgcccagctaattttttgtatttttagtagagatgggctttcaccgtgttagccaggatggtctcgagctcctgatctcatgatccacccgcctcggcctcccaaagtgctgggattacaggcgtgagccaccgcgcccggcctggtctatgctttttaaaaaaaattttatttttatttatttaatttaattaatttatttatttttgaaacagagtgttgctctttcgccctggctggagtgcagtggcatgatcttggctcactgcaacctctgcctccctggctcaagcgattctcctgcctcagtttcccaagtagctgggattacaggtgcatgccaccatgcccaggtaatatttgtattttttgtagagatggggtttcaccatgttggccaagctggtttcgaactcctgacctcaagtgatccacccgcctcagcctcccaaagtgctgggattacaagcatgagccaccataactggcctttatttattttaatatatatattaaataatatatgtttacaaacagagatagagtctcgctatgttgcctaggctggtcttgaactcctgaatttcaagtaatcctcttgcttcagcctatgaaagtgctaggattacaggcgtaagccaccaggccaagcctggtctaagctttttatgtgaattacttcatcttatcctttcaacacacgctggctgaggttagtcctatcactgggtccaatttttttttttttttttttttgagattgagtcttgctctgtcgcccaggctggaatgcagtggtacgactttggcttactgcaacctccgtctcccaggttcaagcaattccaattctctgcctcatcctctcgagtagctgggattataggcacccaccaccaagcctgctaatttttgtatttttagtagagatgggggtttcaccatcttggccaggctggtcttgaactcctgaccttgtgatccacctgcctcggcctcccaaagtgctgaaattacaggcatgagccaccgtgcccggcccactgggtctatttttttttgagacaaagtcttgctctgttgcacccaggctggagtgcagtggcacgatctcagctcactgcaacctccacctcctgggttcaagcgattctcctgcctcagcctcttgagtagctgggattacaggcgcctggctgatttttgtatttttagtagagacaaggttttaccgcgttgggcacgctcatctcgaactcccaacctcaggtgatcctcccacctcggcctcgcaaagtgctgggattataggcgtgagccaccgcacccatcctgggtccattttatagaagagaaaactacagcacagagaggttaagtgtcctcttcaaggacacacagcagtgcagagaggaccttggggaggacccacgaagctgtccttccccaggctggtctgtatcagagatcgccggggttgctgctgaggtcagatgaggatgggttggggagaagatgggtcatgtctacaatttcccctttgggggccagtgcaggcttcagcctgccaggccactcaggctgaactaagaccccaggccacttcccctcactggggtcagctgtgtctggctaggcccatcagccctcctggctctcccggctctgacgacttggttcctcttcctgcccttcccctctttcctcatctggcagagtggccctcttctctgaccattctctccctctctatcctgccccaggcactagaggccctcagacactccatgctccagccacctgtaaaatcacaggctgggccgggcacggtggctcacacctgtgatcccagcactttgggaggccgaggtgggtggatcacgaggtcaggagatcgagactatcctggctaacacggtgaaaccccgtctctactaaaactacaaaaaattagccaggtgcggtggcgggcgcccgtagtcccagctcctcgggaggctgaggcaggagaatggcgtgaacctgggaggcggagcttgcagtgagctgagatggtgccactgcagtccggcctgggtgaaagagtgagactccgtctcaaaaaaaaaaaaaaaaaaaaaaattaatcacaggctgtttgcatcgaagggagagagggttttgctcaagtgaatatcgtgtggggaggatagtcgagaattttggcatgtgatggattggggtcaaagcctggcttgacagttgactgactgtgtgactctggggaggtcacttctcttctccaagcctcagtttctcctctttgcaagtggatttggccgcgcatggtggctcacgcctgtaatcccagcacttttggaggcgaggcaggcagatcacttgaggtcaggagttcaagaccagcctggccaacatggtgaaacctcatctctactaaaaatacaaaaattagcccggcgtggtggcgggtgtctgtagtcttagctatccgggaggctgaggcaggggaattgcttgaacctaggaggtggaggttgcagtgagccaagattacgtcattgcactccagcctgggcaacagagcgagactccatctcaacaacaacaaataaccaaatggattccataatgacccttgtgtggggtctctgaaacaagtacaggagcgaacaaagagaaaaaatgcgccgagatgcctcaggaaatgtcatctgtgaccttgagaggatttaaggcatcagtgttggacagaaagcctggtcaatacatacttgttgaatgaatgaatgaatgaatgaagtcctattgggatgagactgccccctgccctgtctcccagatatctctctcattctgtggcctccaagtctccatgggtcaagtcaaaactgtttgtttgtaagtctcttccttgggggtggggatgcaacgaagagcttgtggtcacagttgaccacaagctgaatatgactcaacctgctggagctcttgtgaaaggcagtcaggggcttgaggtgggtggggtaggaaggacgggtagcttcttccttcagctcttcagagaggtctctctaccccaaggctgaaggcagaactagggcaggcggggacaaccttcctggtatcacaccagggaggggctgtttgtggtgaaggtgatggtgcctatggggctgggggatgtgtgccatggagggaacacacttcctgggcccctactgtgcatggaggtaggtggagaccaggcttaggtggaccaggcccagaacctgcccttggggggctcggtgttccccaagtggtgtctcagttgcccagaggagaccatggctggaaagtactgtggagaggtgagagggcttcctgtagaaggcacgtcttgcaacatgaactttccaggcagcatcagtggtggctgcaagagacatcagccagagaggccttgggtgtgtggtggacaccaggattctagtctgtttggaatggagggtcatggtcctggagggatagacagcccaggccatgtggggtcagcacatagtcctgctggcctctcattgcttaggaggacaggaggctgtggtcaaggtgcctgttattttttttggacagagtcttgttctgttgcccaggttggaaggcagtggtttgatatcactgcagccttgacctcccaggctcaagcgaatcctcctgcctcagcctcctgagtagctgggaccacaggtgcatactaccacgcctggctaatacatttttttttttttgagatggagtcttgctctgttgttcaggctggagtgcagcggcatgatctaggcttactgcaacctctgcctcccaggttcaagtgattctcctgcctcagcctcccaagtagctgggattacaggcgtgcacaacgcctggctaatttttgtatttttagtagagaccaggtttcatcatgttggccaggctggtctcgaactcctgacctcaggcaatccactcatctcggcctcccaaagtgctgggattataggcgtgagccactgcacccagccacatttttttttttatttgagatggagtctcgctcttgttgctcagtctgtgagtgcagtggcatgaccttggctcaacctctgcctcccaggttcaagcaattctcctgccttagcctcctgagtagctgggattacaggtgcacgccaccacacctggctaatttttgtgtttttagtagagacagggtttcaccacgttggccaggctggtcttgaactcctgaccccaagtgatctgcccgccttgacctcccaaagtgctggaatgacgggcactgggatgagccaccgcacccaaccacatttttttttttttaaatagagacaaagtctaactatgttgcttaggctggtctcaaactcctggactgctgatcctcttgccttggcctcccaaagcgctggaattacaggtgcaagccgctgtgcccggccaagatggctgttaatagtgtggccttgggagtcactgagtcaaaatcctctttcattttagattgggcagctcacctaacctctctgcctcagtttcctcattcggaaaatgggaacatcgaggggtgcaaatctcacaggctgctctgcagattcaacgaagcaaaggttgtccagtgtaaatgctagcgttcctcactgtccccatcaatggtggccatgagctggccaggaggaagggctggaggagggagcttttgcaactcaccccatgggctccaggctgtctgctttttctgggcgtgatgagcaagagctctagattgaagacagcaaacaaacagccacttccttcctcacccaggtcctgcgagctgtggttgccgggaggagagctaagcctccgtagctgcttctggagccagctctcagctcccagaccctgccctggtgcctgagggtggccctggagccttgcccccagctcagtggggctctggggccacaccctgcgtccatgcactgtgcaaacaacattctcacctccaaaggctccatccctcaggggagcagggggactggactctgtttcttttcttttctctctctctctcttttttttttttagatggaatctcactctgttgcccaggctggagtgcagtggcatgatctcggctcactgcaacctccacctcctgggttcaagcgattctcctgcctcagcctcccgagtagctgggactacaggcgcccgccaccgcgcccggctaattttttttttgtatttttgtatttttattgttttgagacggagtcttgctctctcacccaggctggagtgcagtggcgccatctcggctcactgcaagctctgcctcccgagttcacgccattcttctgcctcagcctcccaagtagctgggactacaggcacccgccaccacgcctgggtaattttttgtatttttagtagagacggggtttcaccatgttagccaggatggtctcgatctcctgacctcatgatctgcccgcctcggcctcccaaagtgctgggattataggtgtaagccaccgcgcccagcccctgtatttttagagacggggtttcactgtgttagccaggatggtctcgatctcctgacttcgtgatccgcacgcctcggcctcctaaagtattgggattacaggcgtaagccaccgcgcctggcctttatacgtggggacccttgtctttctggagctgggctctttgtctcgtcgctggagattgctgacagtcggtggctaccgtctcaaacatctccacgcagaagctggagctggggaaccctggtcttgtccctcctgctttttggggaagatcctctgggatgtggtccccaacccccaagacagaaacctgcctgtctctgattcattgttacgttcactctttgcatccaatcaattatgggcatttttttttcccctctgagacagagtctcgctctgttgcccaagctggagtgtagtggtgcgatctcagctcactgcaacctctgcctctcgggttcaagcgattctgctgcctcagcctcctgagtagctgggattacaggcacatgccaccccgcttggctaatttttgtatttttagtagagatggggtttcaccatggtggccagactggtctcgaacacctgacctcaagtgatccacctgcctcggcctcctaaagtgctgggattacaggtgtgagccactgtgcccgtgcccagttagtggtcttaactgattctttctcctaaattccttttgactcccagcctttcctgtccatcctcatggccactgattctggacccagcagccacttcactggtctccctgctttgtggctgtatcttatttatttgtttagaaacagagtctgtctctgttgctcaggctggagtgcagtggggccatcacagctcactgcagcctggaactcctgggctcaagtgatcttcccacctcagcttcccaattagctggtactacaggtccatgccaccatgcctggctaacttttaaatgctttgtagagatggggtattgccatgtctcccaggctggtctcgaacatctggcctcaagtgatcctcccacctccgtcttccaaactgttgggattacaggcatgagccattgttcctggccctgtgactgtaccttagaaacaatcactattggccaggtgtggtggctcacgcctataatcccagcactttgggaggctgaggcgggcagatcacgaggtcaggagatcgagaccatccttgctaacacggtgaaaccccatctctactaaaaaaatagaaaaaaattagccaggcatggtggcgggcgcctgtagtcccagctactcgggaggctgaggcaggagaatggcatgaacctaggaggtggggcttgcagtgagccaagatcatgccactgcactccatcctgggtgacagagcgagactctgtctcaaaaaaaaaagaagagacaatcactattatcctcacatgaccaccatcaccaaccaaaggcaaccagtgaacgtcttcactctctctcctacccttctcaaagacaaacagaaactgctgataactccaataccatcatgactagccaatgtcagacaggtcccatgagcaattccagcatcagccttccttacattctcccacgatcaccaccaccaccaccaccacgctataataaccaaccaccatctagtcatcggccaggcacagtggctcacacctgtaatctcacactttgggaggccaaagcgggtggatcacttgaggttaggagttggagaccagcctggccaacatggcgaaaccccgtctccactaaaagcacaaaaattagctgggtgtggtggcaggtgcttgtaatctcagctacttgggaggctgaggcacgagaattgcttgaagccaggaggtggaggttgcagtgagccgagattgcaccactgcactccagccggggtgacagagcgagactctgtctcagaaacaaaacaaaacaaaaaaacaatactagccatcaacaaccacacataaccaactaccattagcaaccacagaaagcagcagtcaccagtcctatcctgttcaaaacccaacattgaaccagcaccaccattgctgatcatcatcttaccagaaaccaacaataaactaccagcagcaaatgaacgctactaccaacacctttcctctccaaataacagcaaccaccgatggtcatcattccactggtcaccaagcatctccagaatttccagctgaaaacaatccaccaccaacgaacaacattaaacaccaaccgccaccaccaccagcccacctgcaagagccattatcaccacgaacctgcaacaagaaacagccacaaccaccaccacaaccaatgacaccaacaacccagcaatgaccactcgcagcaactcctccccaattaccacaatcgtcacctccgtccatcctcattgctgaatccagaaatgaatggacatcccagctaatggcagctaccatggatcaagtgcatgttatgtgctctgtaaagcaatggtccccaacatttttggcaccagagaccggtttaatggaagacaatttttccatggaccatggagcggggcattagattttcttttctttcttttcctttatttcttcttttttccctttctttctttctttctttctttctttctttctttctttctttctttctctctctctctctctctctttctttctttctttctttctttctttctttctttctttctttctttcctttctttctctttcttctttctctctttctttctttcttcctttctctttctctctttctttctttttctttctctttctttctttctttttctttctttctttctctctctctttcttttttttttgagatggagcctctctctgtggcccaggctggagtgcagtggcgtgatctcgtctcattgcgacctctgcctcctgggttcaagtgattctcctatctcaggttcccgggtagctggggttacaggcgcgcaccaccacgactggctaatttttgtatttttagtagagacagggttttgccatgttggccaggctggtcttgaactcttgacctcaggtgatccgcccacctcggcctccaaaagtgttgagattacaggcatgagccactgcaccctgccaacggcattagattttctttttcttttttttttttttttgagacggagtctggctctgtcgccgaggctgtagtgcaatggtgtgatcttggctcactgcaacctccgcctcccgggttcaagcgattctcctgcctcagcctcccgagtagctaggatgacaggcatgtgccaccacacccagctcatttttgtatttttaggagagacggggtctcaccacgttggccaggatcgtttctatctcttgacttcgtgatctgcccgcctcggcctcccaaagtgctaggattacaggtgtgagccaccgcacccggccgggcattagattgtcataagcagcatgcaacctggatccctcgtgtgtgcagttcacaacagggtttgcgatcctgtgataatctaatggcgcccccgagaatctgagaggaggtggagctcgggcttgcttgcctgccactcatctcctgctctgtgacccgatagggctcatggtttctaacagacagaccatggcccgatagcagtccatgaccccgggggttggggaccctgttgtaaaggacttcagaaatactgtttcattgaatccttcagcgatcttcctggcattcaccactcctccaggaagatttcagcatccccagacagaggtgggtgtcatttttttctcttctatcatcctctgcgatacgggtggcccctcccagaccttgtctgccaagccgactgttgactaagcattttcagagggcttccttggggaggggttgcctttctttcaagtagcaaatcacttcctgtgttcttttgatcaaagccctgcccatcccaggacctgagcctccctggcttgcttctcatcttggaagaattcccaccccaacagtctcagagctccagctgatggtttgggtgtgaattccgggatgcccaatttctcatcagctttccttttttgagacggagtgtgctctgtcacccaggctggagtgcagcggcaggatctcagctcactgcaccctccgcctcctgggttcaagttattctcttgcctcagcctcatatgtagctgggattacaggcgtgtgccaccacgcccagttaattttttgtattttttagtagagacgaggtttcaccacgttggccaggctggtctcgaacacctgacctcaagtgatctacctgtctcagcctcctaaaatgctgggattacaggcatgagccactgtccctggccctcactggcttcctgaaagaaggtgttgtctctcagactaacaccacctctgcctcttgccctatgtccctgactccaccctagtaagctgtacctgccaagaatcctgcagtggccgctgtcacagccacatgctctcatcctcactgactgaatgacgagaaatgaaagctgaagtggtctacacagcagagagctgtggggtggggtcagccctggccacctcttactttgcgtcttatggtggtacgatactgctaggaatagcgccatgatcacgacagtctccccgttgctatcatcgacagacctcagacttgacaggcagcaacacctctggctgccatcctcctcttgggataagggatgcccaccaaagggtggcatggacgtattcagcctctcctgcctctgctgcagccataccgcccgtcaccggcacagggagggcgtcaatccaccccatcgcttgttagacatagcttcccatctcagccgaggactctgtggcagaacccacagaccttgagaatgttgcaactgaaagacccctgaagagcaacttccgcatctagacggatttccaaatatgacatctgtgggaaccggggccaagagaggggaagtgactagcccaaggctacacagggagacgagagactgggctggactgggaaagggctcccttaatttgcaagcaaaggaggctatgtccttgtccctgcagactctgtgattctccctgggccaccttctgtcttccaggtcctgccctatccttggatccagggataccaccctggcatccccaccacctacagatgggagcttgctccctggtaagggatgctggaggcacctgagctgcactgagagacaccccacccccacagaagtccaccatgcccctcccctcaccccaatttctgatggtcatttttaggacacctccacctggctggtgtccctcctctttcttcttccagatcccacccttgaaggacttaccatggtggggggctggtgtctgggctcctggaggctcctgaatgggtcgtgatggaggtgcaggttcagggggatcttgggggtggcttgggcatggccctgcttctgcccgttcaccggactcccggctttagttcctcttacaacagccccttctcacttcctttggcgggaggggccgaggccatgggggagggaagctgggtgtggaggggggcggggagctggctgtttggggctctgagcctgaagggaggggtcagaacttgatggcagccactactggacctcagaggcctcttccccaactccttggggacagggctgctgcaggaacatttgggtcagctggctgcaggacgaaccacctcttttcagggcgattcaggaagcatttgggcttcccgggtctctttttaaaaccaaggaaggggcccaggggaggtggctcacgcctgtaatcccaatactttggggggccaaggttggaggatcgcttgagtccaggagtttgagaccagcctgggctatatagcatgaccccatctctacaaaaaatgaaaagaaaaaaaattagctgggcatggtggcatgagcctgcagtcccagctactcagagggctgaggtgggaggattgcttgaacctgggaggtggaggcctcagtgagccctgattgcgccactgcactccagcctgggcgaaagagtgagaccctgtctctaaaaacaaaccagaaaaaacaaaaaaaccaaaaaaacaacaacaacagggaagggtgccttcttcagctgtgtctgctctgggcatccctgggcaacctccttcattattattattgttattattttgagacggagtctagctctgtcacccaggctagaatgcagtggtgcaatctcagcttactttaatctccgcctcctgggttcaagcgattctcctgcctcagcctcctgagtagctgggattacaggtgcccaccgccacacctggctaatatttgtatttttagtagagacggaatttcgccatgttggccaggccggccttgaactcctgacctcaggtgatcctcccaactcggcctcccaaagtgctgggattacaggcataagccaccacgcctggcccaacctccctctttagatgaccctcagaagtcacacgtgtttgtgtgcagaagtggagggtactgggaagcaggtgcatctgaaaggtccctgactttggatgtcacatctagatttaacagcctccagtttggctacttcctggatgacttagttactcccttttctcattgtaaaatgggaacgtgggtccccccagcagagcctggcccaggtacgtgtcagcctatgagctggtctttgggacaccagccaaccacctgaggctcctcttgacatgtgaggaaatggcagttctaataggttgttacttccccacaccacccagcaaggaggtggccgaggcaggacccgaccctgggagaccctgggggacccatgttcagatctatctttggtccagggcgataaacccgcatcccccttgaagatgttaatatgcagcgcccctagtggccacagctgggaaggagcccgtctctgctggaatctcctgagcgagtttgcagaattgacgggcttggggcatgcaattctcagcaatgtctccaggcactcaagagtgaatatgaatgggtaagaggaccccactttgttgggggccatcaggggaggcttctaggaagaggcaacgtttgtgctgacaccggcgagtaagctggagttaaaaaaggtaaaggggcaggagcgtgcacctggccatgctaagcgctcaagcaaaggcccagatatgggaaaaccatagggcaattgaggaagttcggggaggctggtgtggctggagcatgcggagtgacggagagtgtgatggccagggtggcaggtgctagaccgtgtggctttaagagcctctgtgagggccaggcatggtggctgatgcctgtaatcccagaactttgggaggctgaggtgggaggatcgcttgagcccaggagttccagaccagcttgggcaacatagcaagacctcgtctctacaaaaaattaaaaaatcagctaggtgtgctgttgcacctataatctcagttacttggcagggtaggcaggagaatcgtttaagcccaggagttcaaggctgcagtgagctgagatcgtgccactgaactccagcctgggctacagagtgagaccctgtctcaaaaaacaaaaacaaaaaagcaaaacccttccacgagaagctgttgtacttttctcctaaaatccctgggttcctgtctgcaatgttaaaagtccccttctggctgggcacggtggcccatgcctgtaatcccagcactctgggaggccgaggcgggcagatcacgaggtcaggagatcgagaccatcctggctaacacggtgaaaccccgtctctactaaaaaagtacaaaaaattagctgggcatgttggcgggcgcctgtagtgccagctactcgggaggctgaggcgagaatggcatgaacccaggaggcggagcttgcagtgagccgagatcgtgccactgcactccagcctgggcaacagtgcaagactccgtctcaaaaaaaaaaaaaaataaaaaaaaaaaataaataaatcagctgggtgtggtcgtgcacgcctgtagtcccagctattcagaaggtggaagtgggaggatcacttgagtccaggagatcaaggctgcagtgagctatgataggcatagctgggcgacagggaccgtctcaggaaaaaaaaaaaagaagtccccttttggctgttgggtagacctgggagaatgggtggtcctttccagacctgggtgggggctactggatgcactgacacacacacaccgcaattcgtagaaatctacacaagacagaactttattgatgtagggcttcctggcaggagtgtgtgggccccagggcagggtctgtagcaccatgagggggtggcctggatgtcggggtgcccctggggcgggcagggcagaggttggggtggatcctccccctagtcaggtcaggggagggtgtcagggaggtggtgctacccccccccctcccatagcagacacagattcccccccagctcggagtggaggggtagggcagtgctggggggcagggcaccggcagaccacctccccacccctactcttcacagtacatattccgatcaaaggagggggggagtgttggggactccctaagggtgggttcaaagggtgctggggtgaacagctgtcccctccccagacccaccctggagggggggtctcactatgtgaactggaaggggcggatgctgaagaggggctctggggggatagccagcccctctccatccccccagccagggccctgcaggggttcccaataaataacttccggctccgtctcacccttccctcccagttcccgcccccccggggccccctctggccggcccgctgcagggctggcggcggagaccccgccagctgtggctccgggtgccgcgcgccccctagtggccatggcaggttttgcagcacatctggcggaagtaggctcggctgcagaactgaaatttgagcaccagggggcagtaggcgaccttgttcacatccttgcactctgcggggacgggagaaggaaggaaaaatcaggtctcagctgccctccccgcagggctgcacacacgacctgcagtgcttcctggccagtgactttctgtgccttggtttctttctttttaaatttactttttttttttttttttttttttttttttacagatgttatcttgctatgttgaccaggctggtctccacctcttgagctcaagtgatcctctcacctcagcctcctaagtagttgggactacaggtgtgagcaaaccacgcctgacttctgtgccttagtttcctcaactatcaaagggggcttataatagcaccgatgtcactaggctgttttgaggatttaagagagagagtgtagggttgggggccaacacagacacattagtaatgagaaaagggccgggtacagtgtatcatgcctgtaatcccagcactttgggagaccaaggcaggaggactgcttgagcccaggagtttgagaccagcctgggcaacatagtgagagcactgcatctacaaaaactaattaaaagaaaaaaataggctgggcatggtggctcatgcctgtaatctcagcactttgggaggccgaggcaggtggatcacttcaggtcgggagtttgaaaccagcctggccaacgtgatcaaaccccatctctactaaaaatataaaaattagctgggcgtggtggcgggtgcctgtaatcccagctactcgacagcctgaggcaggagaattgcctgaacccgggaggcagaggtttcagtgagccgcgattgcaccactgtactccagcctgggagacagagcgagactctgtcacaaaacaaaacaaaaaaacaaaaaaacaaaaaaaaaaaaaaggaaaaattagccgggtgttgtggcatgtgcctgtagtcccagctactcaagaggctgaggctggaggatcgcttgagcccaggaggtggaggctgcagtgagctatgatggcaccactgcactctagcctgggcgacagagcgagaccctgtcaaacaaacaaacaaacaaacaaacaaacacgacccaataaaacaaaagaagacaaatattccctttcctttccattgttccttttcatagcacccaggaaaaaatgtccatttggggctgtaatcctcactcgttttcttttttaataaagtgaagataggccgggcatggtggctcacgcctgtaatcacagcactttgggaggctgagtcgggcggatcatgaggtcaggagatcgagaccatcctggctaacatggtgaaaccccgtctctactaaaaatacaaaaattagccgggcgtggtggcaggcgcctgtagtcccagctattcaggaggctgaggcaggagaatggcgtgaacctgggaggtggagcttgcagtgagcggagattgcatcactgcattccagcctgggcgacagtgagactccgtctcaaaacaaagcaaaacaaaaacaaacaaaacaaaacctgaagctcttgagtcccagctgagtgggtgagtcagggtatttttcagaacattgactattttgtgtgatcatgatgtctgttgatgactatggatggatatgagcttccatctagcggccagtgatttatggcaggaccaggggcgaattaaaagctacagatggattttttttttttttttggtcgcccaggctggagtgcagtggcacaatcttggctcactgcaacctccacctcctgggttcaagagacactcctgcctcagcctcccgagtagctgggattacaggcacatgccaccacccctgtctaatttttgtattcttagtagatctggggtttcgccatgctggccaggttagtctcaaactcctgacctcaggtgatctgcccaccttggcctcccattgtgttgggattacaggcgtgagccaccacgcccagcctaattttattttttgtagatacaggtgtcttactatgtctctcaggctggtctccaactcctgggctcaggcaatctttccagttcagcctcccaaagtgctgggattacaggcatgagccacctcgcccggcctgggtggatcattttattgcatctcccttctggggcacccctcaagtgaatatatcatttacatcccgtgacagataaagaaacaaaaacacagaggtggaagatgaacccaggtagtttggttgcagtgcccagactaaggaattaattgttctctatcaaaaataaatttatggacctggcgcggtggctcatgcctgtaatcccagcactttgggaggccaaggcgggcagatcacctgaggtcaggaattcgagaccagcctggccaatatggtgaaaccccatctctactaaaaatacaaaaattagctggtcatggtggcacgtgcctgtaatcccagctgctcaggaggctgaggcaggagaatcacttgtacccaggaggtggaggttgcagtgagctgagatcatgccactgcactacagcctgggtgacagagtgagactttgtctcaaaacaagaaaaaaaaaaatttacagccaggcgcagtggctcacgcctgtaatcccagcactttgggaggccgaggcgggtggattacttgaggccaggagttcaagaccagcctgggctacatagaaaaaccccgtctctatcaaagaatacaagaatacaaaaattaactgggcactgtggctcttgcctgtagtccttggggagacttggggctgagacaggaggatcgcttgagcctgggaggtggaggttgcagtgagccgagatcgctctactgcactccaacgtgggtgacaaagtgagtcccggtctcaaaaataaataagtaaataaggctgggcatggtggctcacgcctttaatcccagcactttgggaggccaaggccggcggatcacaaggtcaggagtttgagaccagcctggccaacatggtgaaaccctgtctctactaaaaatacaaaaattagctgggtgtggtggcgggcacctgtactcccagctactcagcaggctgaggcaggagaatcgattgaacccaggaggcggaggttgcagtgagccgagatcaggtcactgcactccagcctgggtgacagcgagactccatctcaaaaaaaaaaaaaaaaaaaaaaagtaaataaaaaaataaaaaaaattacctaggcagaaaaaaatgtgtatacttaaaagcagtggttctcaagggaagtgatcgattttgacccccaggggacattgggcaatgtctggagacgtttttagttgtcataacttgggagaaggctgctactggcacccagtgggtagaagccggggatgctgctgaacatcttacaggctggcacaaatcccagcactttgggaggctgaggtgggaggatcgcttgagcccaggagttggagaccagcctgagtaacacagcaagaccccatctctccaaaaaagaaaaacaaacaaacaaaaaaccctacaatgtgctggacagctccccacggcaatcatctagctcaaaatgtcactagtgcctgaggttgaaaaaccgatttaaaggaaaaatattcaggaaattgtgctacaggtggagatgaataggtacaggttatgaaagtgactggggaaatgtcacaagtttgggtgcacagaagggtcaggtgcctgaaacactcagcatacagtggcacttaataaatgcttgcagggaggggatggtgaaggatggcctggcagagacacagcaatgcatttccgaggttccagaagttctaggatgaagtcaggacccccaatgccctctgtggctgcctctggccaggaccctcctggcgcaccctggctggtcacccacataccttcagggccgtccccgggggttgggctgtcgcacttggcctcacactgctgcgtggtgggcggccgcagggcctccgtgcactcgtgcgacgcctggcccgtgtggctggtgcagcgcaccgagcgctgccgctgcccgacgccgcactgtgcagagcactgcgagggggcaccactcagttgctgccccgcagcccctgccctggcccccacccctctggggcgcgccctcctacctcaccccactcgccagccacccagcgggccggggggcagcggcgcaagttgcagcgcatggtggccggtggcttggcggcgggtgagcagtgcgccgggggcagcgtggcgcggtggtctgcgctcttgcaaaggaccacgcggtggcggaggcccggcccgcagctgggggtgcactgcagttggaaggggcgtttcgtgctcagggtgctgccccagtgcgaagtgaggaggggacagctaacctggagaccgcgcagaggcgtctccgtggacaccccacctgggcatcccagtgggcgcgaaggaagggggcggctgacctcagaccagtcgagggccgcccactccggagggcaagtggggccgtggcaggcctccagtacaggtgggcgcggctgcgggcatgcgctgtcgtccagcgccttctcctccgcggcagagacgcggcgctggcacacgaccgagcggctgcgcacgcctgcatcgcagctgcggctgcagagcgaccagttccctacaacccagctgtaagagatgaaggggtctgagcaagtaagcagggcagggggtcccaacacaacagcagggggcactatagcctacccccacccttccaatcacccagcctcatatggaaactggcaccaggcacctccacattccacacttggggcatcgttagcctgcacccagactgggggcagagaggtgcattaccctaaggagaaataaatctttggacaatgcgagtgaccaggcagcgccatcattctgactccagggccatgcagctttgaccgccaccttgggggcactattaccttggactcccccataactcctatagaaccatcactgcagcactcggcccactgtcactccgactctgcactaatctgctccccacccccctggagcactcgctcttgactccagggagtactctcctctcaccctgagcaacactgccccctggcggcactcactctggagggcaaggctccgtgttgcaggcgcgctgccttttgggcagcttgctgtgggcactgcagtagtggggggcgaccgcggagctgtccagctggttgcggcactccaccgcctgcacctggctacctggaggggagggtgagaggcctgctcagcccctcccggcccagagaacctcagcccaggtatcttgtgccttcccccacccccggcctcaccgcctgcacactgggccgagcacttggtccagggcgcatagtgccaggagtaggggggcagcgagtcacgggcgatgggggcattgaagcggtagcggagggcaggcagctcggtccgggccagcacctggagaaagggggcggcagccagtggaaggatcgcatggagtctctaattccaaaggctgcaccttgcccccagtctccctgttaccatgacgatgagagatgcattaatcggtcccagggcttcgaggctctggacctggtctggcccctgtcgcagttgaaaggtggtcccagctagaggcagacggtggggctggggggtcccaggcagcccctccagcagcagggactcctggtctcccttcagggctgggggacgatgcagggttcagaattctagtcatgctgaaaccgccctccccactgacccctaatcctcatcccctccccaccatctgctcacccaagtgactgagagagaggttcagatcctggatgaagatgtggacggagcctttgggaatccagacgacatcctcgtaccctgaacagcagagctcagatgtcacccacttggcatgtccccaacacctgcctgcctcccctgtccccggcccatgaggataacagctaactattactgcgctaaacacacatctaactgcacccctgccccacccttgtgaaccaggtgtttcattatccccattttagggctgacaaaactgaggctcagagaagctaaggaacttgaccaggttttacagctaggaaatgactgggttaggatttttctttctttctttctttcttttttttttttggagacaggatgtctctgttgcccaggctggagtgcagtgaagtgatcttggcttgctacagcctcagactcctaggcttaggtgatcctcccacctcagcctctggagtagctgggactacaggcgtgagccaccacacctggctaactaaaaaacctttttttttttttttttttttttgtagagttgggggtctccttaagttgctcaggctggtctcaaactcctgggctcaagtgatcctcttgcctcagcctcccaaagtgctgggagcaccggtatgagcctggccagctttttttttttttcagacaggatctcactctgtcacccaggttggagtgcagtggtgcgatcataggttactgcagccttgacctcctgggctcaagggatcctcctgcctctcagcctctcgagcagctggaactacaggtgtacaccaccacacccgcctaattaaaagaattttgtagccgggcacagtggtcacgcctataatcccagcacattgggaggctgaggcgggcagatcatgaggtcaggagattgagaccaacctggctaacacggtgaaaccccatctctactaaaaatacaaaaaattagccaggcgtggtggcgggctcctgtagtcccagctacttgggaggctgaggcaggagaatggcatgaacctggtaggtggagcttgcagtgagttgagatggcaccactgcactctagcctgtgtgacagagcgagaccccatctcaaaaaaaaaaaaaaaaaaaagaattttgtagagtttggccgggtgtggtggctcacacctgtaatcctagcactttgggaggcttaggtgggtggatcgcttgaggtcaggagttccaggccagcctggccaatatggtgaaaccccatctcttctaaagatacaaaaattagccgggcatgtagtgcatgtctgtagtctcagctacttgggatggtgaggcaggagaatttcttgaacctgggaggcagaggttgcagtgagccgagatcaagccactgcattctagcctgggtgacagattgagactctgtctcaaaaaaaatttttttttttgtagagttggggtctccctaggttgcccaggctggtctcaaactcctgggctcaagggatcctcccgcttcagcctcccaaagccctgggattacaggtgtgagccaccgtgcctgtctcacttttgatgccagcggccaggctgcttattataaaaccccaatgggactctacctggggactgaaactcacactctgcaacctactcctgcctcacctggacacactccctccctctgacagtgcctacggcttcctcagccttccagatatttcctgagcctcctcccctcttgcccactccctgggctctctgtcacttgcccaaagcccaagctggaaaaggtgctttctacattctctgaatatcccctcccgtagtaagcctttccctgctagcacagaacattcattctcgcagctcctctggctcacagaggatggaaagtgatgcttgcttccacccagacgtggcatgagcttctccaggaggcagaggagacagattcgggctcctgtctcctgagacactcttttttttttgagacagagcctcgctctgtcgcccagactggagtgcagtggtgtgatctcggctcactgcaacctccacctcccaggttcaagcagttctcgtgcctcagcttcctgagtagctgggattacaggtgctcgccaccacgcccagctaatttttgtatttttagtagaaacagggtttcaccatgttggccaggctggtctcaaactcctggcctcaagtgatcatcctgcctcggcctccaaaagcgatgggattataggcttgagccacttcacctggctgagcccgcaggacttttggggactcctgacactccacggggcccctggggtctgaggagttagtgatctcagctactgcactgggatcagttccacctgcagtcagctggcccatgcagggagtgtgggagggaagctggagactctcaccggccccaggtgaggctgggctgaagacgccctcgatggtctcgcaggcactgccgtcaccgccacacactcggcacttgtcctcccgcaggtcggagcccaggactcggtcgcagcccacgtgctgcgtggagaaggcgtgagtgaggcgaccccctaacccacccccgctccccatcccctctccacctccctgggagtcccctccaccttgcattcgccactgacgcaaatgtccaccgtgtctggacggcagggtgtcccgtccaccacggctgccgccctctccgtgtagaagttgaagccttccgctaggcacgtgagcgagcaggccttcacgccccctggggggcacggccccgtcacaccacgggccaggccaccccggaactctttgcttgctccctgggggagtgaggccaagagggacagaccccagacccaagaggaagggcagcttgggcagagggagtgggggctcccagcgtcacgttgaacccccatggtaccgtatcccaggtactctgtctccccgggtggggacagggctcagggcagaccccgggatgctgcattcatccacctgctgctggacactcccacggctgcccttcacggccccacagcctttggagtcccacactcacctccccggtacgttttccacttgtagaatttcccacggaaagggatgctgtcaaattcagaacactgcacttctctgaagtcctgggagccagggggacagtcctgggggcaggagaggagagatggagggaggccaggcttggggggatggagtcagaaaaggggtgctcagagaaagatgggctggaggagggaggctagaggcagggaggccagggaggaggctgtggtggtctgcgtgagactaggcctggaaggtagcctgggctgggcgtgtagacacatctgggataggactggatccctcattagaggtctgagggtgagctgggcaggacacacctgggtttctggttccaggctatggaatctttcttgcttgcttgcattttttttcttttttgagacagaatctcactctgtcgcccaggctggggtacagtgcatgatcttagctcattgcaacctccatctcctgggttcaagcaattcttctgcctcagcctcccgagtagctgggattacaggtgcatgccactatgcctggctaatttttgcattatttatttatttatttatttatttttagacagagtttcgctctcgttgccctagttggagtgcagtgacacaatctcggctcactgcaacctccgcttcctggattcaagtgattctcctgcctcagcctcccaagtagctgggactacaggcgcgtgccaccacgcctggctaattttttgtatttttagtagagacggggtttcaccatgttagccaggctggtctcgaactcctgacctcaggtgattgacccgcctcggcctcccaaagtgctgggattgcaggcatgagccacctcatccggcctaatttttgtatttttagtagagatggggttttgccatgttggccaggatggtctcgaactcctgacctcaggtgatctgcctgcctcagcctcccaaagtgctgggattataggtgtgagccactgcacctggccacatggagtctttcttgagagagaaggtctggaagggatcagggtttatagaaagtgctagcatgtggattctctgaagacctggttccccccagctgggaggctgaaaagtccaaagctctcactgccctctaaaacaccccctccccagtaaacttctcactgctcactgatggttgcaggtcagctgagggcacaagcagaggacagacacctgtcactgggtttggtgagaggaagcttcagctacaactttgggggatgacagaaggcaggggtaggactcttcaggggaagttgggctgtaaagggaggggagagactggatggtagggggttgtgagggccaagcagtgatttcaaggtgggggcttgtagtctaaatgtaggaggaaaagagagctggaaggagccaggtctttaaggaggaggggttggggacgagaaggtggtgggggtcagggagaggagggaagagaggggtggcggctgcaggttccccaggaggcagcaggtgcctggatgaagcactctgatagcgtttttgtttttttttttttttttgagatggagtttcgctctgtcacccaggctggagtgcagtggtgcgatctcggctcactgcagcctccgcctcccgggttcaagcgattctcctgcctcagcctcccgagtagctgggattacaggcgcctgccaccacgcccagctaatttttgtatttttagtagagacggggtttcactatgttagccaggatggtctcgatctcctgacctcgtgatccgcctgccttggcctcccaaagtgttgggattacaggcgtgagccacggtgcccggcctctgatagctgtttttaatgcttcctccccccacccctcaaggggtttgggggaactcacatccgtgttgcaggagcggtgccgccttctctcacccagacagtacttgcccccgatggttggcctggaaagggtggtgggataggagagggatgaggcagtgggcgatgggggcaggggtcgcgctgccctcccgggtgggggtcctgagggctgacctggggctgtcgcagtgacggctagaagaggacacgccgccgccacaggtccggctgcagtcgccccatggagtccacggcccccaggctccgtccacaccctctgggcgcgacccaaaggggacacagacccgtttgtagcaccactgggtggggggagacaggaaggagtgagtccagcccggaggacactcgtcggccccatgcaccgttccccactccaggccccagccagagatatcagcctctccgggatgggcagaggcggggtctgaacatgcgaacagagtcaggttacgtaggagagtggtctgggagacagaccaggtacaagcgagaggcgtggcctgagcacagggtgcttaacggggaggggtgtagacaggaccacgataagcgtggagacgaggtggggcgtggcttcaggctggggaggggaggtctacaggcagtaggcgtggccagagccgagggcagcacaggggatgggcgtggccaatgagggagagagcaaacagtaggcgtggccagagccgtgggaatcattacacggtgggcgtggccaacgcgggagggagttaaacagtaggcgtggccagaaccaagggacgcatagacggtgggcgtggccaacgcgggaaggagcaagcagtaggcgtggccacagccgagggagcacaaatggcgggcgtggccaatgtgggagggagcagataataggccgaaggacaggcgggtaggcgtggccaacgcgggaggtggctcagggggcgtggcccagttgggggccctggccggcgctcacccccttgtcgatggtgtgcgtctggcacagcgtgccctcggcggccgggatgctgttggtgatgcaccggttgctcttgctcagacaccacagctcgctgcagacctcctgcgggccgaggtgcccgctcaggctcgcccccctcccttcctccctggggcagcccgcccggcttgggaggacccagatgtccggctcactgccggtcccagagcagagagcccggtgctcccttcctggctcgcggtgggtcttcgtgcatccccttgcggggcatggcctgtgacttatactctcccaataagctccatttatggagcactttatacatgccatatacctctttaggcagtactaccccatcttactgggagaaaaccaagcttcagacaggtaaggtcacacagctactaagggaatagcctggagtttaacccagctctttaattcagagtctgtgctctaacgaactttgcaattcagttcctggtgccttctgagtttctggaaggaaacgtgggaactgctgaggaatgaacaggaaggatttggggttcttttatgggatgggcaaagtagccgaagagaaagtggtggttctgagaaatcggcctggatgatgactaggccaacggcctcatctctagttttttccagctgttggttctctttgttcccccatctaaactggagaagcccccaacacttttaagctatgtggaggggtgggagtttgggaggggacaatgccgagttaggtctgtgtgggacatgcctctctttctccaggtgaaaaatcagccccaccttcttcccgtctgaatcctggatgggctgaactagtcccagggactcactctgactcttaaagtccaggttaatatccctggagaagccccagtgagttcaggtgaagcaaaatctctgaccctcttggcccacatcctaagcaacctcccagcgtctttcctctaaaaagtaggtggtcctctctgaccctcttggcccacatcctaagcaacctcccagcgtctttcctctaagaagtaggtggtccttctgtaattatcaagtgtaatccccgctttgaacccaattcttgtaagctttccagatgtgggactggatcgatcaatggccacaggaaaggacccttcctaggtcagcccctgagagatacctgtacatatgtaagaagctggaagagttgttctcaaatacattctccctcaaaggtcctctagaatctctgccttctgccttatagaggacatttctcagctaaaaactcagactgtgtcctcttggccatatctaaaaatatcacatcagtcctgtcgcaatcccacttctgacacctcttcaagataatgatttcagctctgcttttgtcctcctctccacaaggaggcactgtggcatatttgagttgtgcagagacctcaattctgctaccaacttgcaatatatttcccctctctgggcctcagtttactcatctacaagatgggcagcctaatgcctgtcttgcctatataaatggctatgaggcacgtgacaggatagataagaaaggacttgcaccaatgccattatggggtaacaatgaccaccactatctctggaccaggcaccaggctgaaccctttacatatattaaccagttcacatttagtaaataaatccccctttgccaagatggcctgaaagatgttccttcaaaaactaaaaggaaggctcaattcaacatatagccagtgccagcccaagcttgatattttgacagctcctcccctcccctgcccctttgtaaaatttagagagtcatgagagacctggatttaaatcccagctctgtcatggtctcaaactgtggccttggacaagtcatcctccctatgctatggctcagtcccttcctctgtaacgtgggggctagcaggattgtcaggagtttagatggtgacacacagcacatgcttagcccatagtgagagctcagtaaatgtcagacaccatgatcattgttaggatacctgggtcacagcagatgttgaggagtagcttcagaattctttaggaattccttagagggtgctgcagttaccagctaagttaggatgttggggggtgtcaagggtggaatgtcagtgaaatagaaattgttccagggtttgtctctgtcttgcagtggaatgaagggagggcaatttggcagctgcttgccctctgctttgcattaacatggcatcacaaaaactctgatcgtttgagttgtgatagtgtgaagaactggggctgaacctgggcccctagggctgagactgtgaggagcttaggggtgcatttagggaatcgaggcaggtgggcagaggaggagcagatcctggctgaaccttggtggctgaagcaggaagccagcaggtcttcagcttcctggggggagctgggagtggaacctcctgccccccaatgcccttctctatgcacgaatggggctttgggaatctaaacctcaggaaagggtggggagaggtcaggaggctcagagctcctccagacagggagtccctggaaggttctgtctagttctttgccaagtaggaaagatggctcatccccagggaaattatttccgtcaggactggatgtttagttaaaaactgccccgtgagaggtcttgagactttgatcctgctgtagcccacagggggtgtgatgtgccagacagaagctggccccccagcccagccctcaaatcaggggtctggagaagcaggtgatcccatttttgttcccaagcactgtctgattgcttaggacattttgcacactccatgcacctctgtcctcccaggtcaccatgggggctcacctcaccccccttcccggttctcccaccccctcacttcccaggtgggtgccctggtggagttccctcccccagccccagcggccccctcccctcccaggaaggaaagcaggaagactctctctaccccgtatttacactgacgcgatttgactccatgctgaaagcggcattgctcatctgcatcgtaggcttggcccggtgccactgtcgggtacacaaagtcctgtctggggggccggttgttcaggcagagccccaggcccgagctgcctcgagagaaaagcaactgtcatgctaggtggctgcaaatcaagagctcaggagcctcagctggatgggggtcccagggagcatccctgatttctatcgtctcccgtgtaccctgccccaccatgagtgtgacccgctctgagggacacccaggtgcatcctcactctagaaagctggtgatgtagtcacggctgcaggatgaccacacgaatgggttggtcttcatggtaatgtgggcagccatgagcttggctgggtcctgaccacgggccccacagctgtttcccacgccgtcatggttcatgccgaatctggggaaaggggtgtcggctctgccgggcgctgagggacccgcccagctcctcccctcctccccctcttgtgtgccctggcctcacgtgtgcccgatctcgtgggcaatggtgaacgctgtggccaggccaatgtcctcattgacgctgcagcttctctcgcgctcacacattccgcccaccggggccaggcctgggaagacggacatgtggggatggggctgggaggctcaggacggtgctggctggccccatccacctgccaggtctcaccccagcccactgccttcataggcgcctgaaacctacggggctcgggtacctagtgtgccgcagggtttgttcttgtagatgcagatgtcatagctgtaaaaggagacagggtcagtgagggggctgggctgtctccctaagccctgctgatgccaccatgcccagctctgggggttgagtcctgccttggaggcgccatctgcctctcacctgaagctgcatacaggagtgactgaccacatgaatgaatgaatgcatgcatgcatgcatgagtgggagaataagtgaatgagggcatcggtgcccaaatggtcccaaacctcccttacccattattctcaagcagcccctccccatccctggctccctcatgggcagcccaaacttctctgctcctcctgaccctagcagaagtgatctctgtttggactctcatggttccctggaccatctgttttctcagccccagtcctagacctctcctgtcccctcaccgtgtgatgagcactgctgtgtcatggttagccacaccgttctctggaatggcattgccatggccgctgtggttcacgatggatttctgccacttacagaagctgtccagggacttcccggcatggtgggtgatctccagagtgggctggggatggacagagggaaatgcatgggcacccaccacccaggggacggcaggacatgctggtatgaaggggaaggggaaggggaggaagtcccccgcacctggtcctccgtgagcaggatgaggcgagttacgaggatgttaacggtgcttcccagactcgagtcctggaaaagtttggcaacctgacctccaagaaacaagagagaccgagtcttaagaggagcccagggtagaaaatgaaaagcaaaaacaatgataacagcttgctttcatcaggcacctactgtgtgtcgggtcttaggctaaacctgctattagggttttttgttgctgttgttgttaaagatgggggtcttggtatgttgctcaggctggtcttgaactcctgacctcaagtgatcctcctgcctggcctcccatagggctgggattacaggtgtgagccaccatgcccagccatgtatcagtcttttcatgaataggtaatatttgctgttgttactatttgttgttgttgttttttgagatggagtctcgctctgttgcccaggctgcagtgctgcggtgcaatctcagctcactgtaacctccacttcccaggttcaaatgattctactgcttcagcctcccaagtagctgagactataggcgcacatcactatgcccacttaatttttttttttttgagacagagttttgctctttttgtctagggtggagtacaatggtgtgatctcagctcactgcaacctccgcctcctgggttcaagcgattctcctgcctcagcctcccgagtagctgggattacaggcgtgagccaccgtgcccagccatgcccgcctaatttttgtatgtttagtagagactgggtttcaccatgttggccaggctggtcttgaactcctgacctcaagcgatcctcctgtcctggcctggcacagtgctgggatcacaggtgtgagccaccatgcctggccatgcatcagtcttttcatcaacaggtgctattatcatccccaatttacagatgaggagacatgcaaacagaggttaggacacagctggtaggtgtcagaagtgagactcaagtctggattgcttaccagaacatttctttcagactcctccaagctcagcttatctacttgtcccccaacccctgcttacccccctgactgcctcaagcatctttgtccagaggcgacctgagggatatacatgtctgagttcattccacagctgtctgaaggtaccaatttgcccatcaccacaggaaagtaaaactgtgagggcaggaggctctggagacagtggtcagaggaaaggaggaagcagccccagggatgagctggcacagaagacagaggccaggctgtgcagggatcttggaaccctgggtaatcatttccccgtctggaaatccccagaattttttttttttttttttttttttttttggagatggagtctcactctgttacccaggctggagtgcagtggcgcaatcttggctcactcacctccacctcccgggttcaagcgattctccagcctcagcctccggagtagctgggactacaggtgcccgccaccacgcccagctgatttttgtatttttagtagggacaggatttcaccatgttggccaggcttgtttcgaactcccgacctcaggtgatccacccgcctcggcctcccaaagtgttgggattacaggcgtgagccactgcaccgggctggaaacccccaggaaattctgaaagccctagggagagaggccaggctcaggcacaactgagggccatcagagacgacactacacaacattttggaccctctgcctgtctgctaaactttttgttttcccttttgcttcagtgaaacaagagcaccattcatcaagcccttactatgtgccaaatagcctacctggcttcccttccaccaatccttactctctagggtagctaccattatatctccatttgatacactggtacgctgaggcttagagaggtcaagaatctcgcctgagatctaggatggaaatggactatatctgaaggtgggttggggaggtcagcctgtaggaatttataagtaggtgcttgtgcaagaatgctgcgtgaatacggatgtgtgcctgtgtgtgtactgctaacctcaacgagtacctgtgagctacctatctatcatctatctatctattttgagatggaatttccctcttgttgcccaggctggagtgcaatggtgcgatcttggctcactgcaacctctgcctcccgggttcaagcgattctcctgtctcagcctcccaagtagctgggattacaggtgcccaccaccacgctcagctaatttttgtatttttagtagagacggggtttcaccatgttagccaggctggtcttgaactcctgacctcaggtgatccacccaccttggcctcccaaagtgctgggattacaggtgtgagccaccgtgcccagcctactgcgatttatttatttatttatgaatgaatgaatgacagggattataacccactgcgtctcaaactcctgggctcaagtgatcctcctgcctcagcttcctgagtagctgggactacaggcatgtgccaccatgctctgctaatttttaaatgttttgtagagacgggatttcactatgtttcccaggctgctgtgtacttatttttttatttttttttgagacagagtcttgctctgttgcccaggctggagcacagtggcgtgatctcagctcactacaacctccacctccctggttcaagcgattctcctgcctcagcctcctgagtagctgggattacaggtgcccgccaccacgcccggctaatgttttgtattttttagtagagacggggtttcaccatgctagccaggctggtcttgaattcctgacctcaagtgatctgcccaccttgggcatgagccactgtgcccagcctgtgtgtatttttacacacagcaaacacttatatgccacctactgcatgccaagaactgttctacatgctttatgaatgcactggatctaccttagctttataaagtaggtaccacaattatgcccattttacagataggtaagacaaggcagagaggtgaagtaacttgctcaaaggcagacagttaaaaagtggcagagcggaaatttaagcccaagcaggttccctctgccccagggcacctctgcatctagtcactgtgcttatgctctttctcctcctcgttcattgccatatgcaaccaacctacctacctaccttccttccttccttcctctctctttctttcttttctctttctttctgtcttttcttttctttcttttcttttttttttttttttttgacagagtcttgctctgtcgcccaggctggagtgcagtggcgtgatcttggctcactgcaagctctgcctcccaggttcacgccattctcctgcctcggcctcccgagtagctgggactacaggcgcccgccaccacactcggctaattttttgtatttttagtagagatggggtttcaccgtgttagccaggatggtctccatctcctgaccttgtgatctgcccgccttggcctcccgaagtgctgggattacaggtgtgagccaccgcgcccggcctgcaaccttcctttctacccctgtccccacgtcagggattggggtgggatggtagccacccccttgcctaacactgcaggctggctccaagtcctcagggctgcgtgcccagggaggggaaggcacttacaatgttcatgatggccaggacatactgctccacatcccggcgcccgtgataggccaccatcatcttgtcagccaccaccagggtctccacgtagcgctctcggctgaccgatcgcttcaggcctggctggccacgctctgtttcattccccaggggcctggcaggcggtggcttcaaggtccgcagccaccatggccgccctttccacggtttctcatctggggaacccagtagagcaattaagccctgccctgctggtgggacgcagagctgcctgacaactgtcttgtccaacctctgactggctacctctctacccaacagtctggacagacaatttctggtcattctgctgccttctcttgttgtccagctacctgtgtgatggtctgtctgcccaatgggctgccaaacacctcatcgtttttcttattctttttttttttttttttgagacggagtatcattctgtcacccaggctggactgcagtggtgcgatcttggctcactgaaacctctgcctcccaggttcaagcgattctcctgcctcagcctcccgagtagctgggatgacaggcatgtgccactatgcctggctaatttttgtatttttaattgagactgcatttcaccatgttggccaggctggtctcgaactcctgacctcaagtgatccacccgtctcagcctcccaaagtgctgggattacaggtttgagccactgcgcctggctgcctcattgttttgtctatagggcatcttggcggtaccatctcttttttttgtcagtgtcctactacctgagaatattgtagtctaccatgatgtcactgtccctctgccaaactgttgagttgaataacagcctgacttctcccactgttggttgtatggctgttccactgcctgtttgccaacctgttcagctaccagcctgccccgctgcccaaatgtccaactgaacacttgcatgactgtcccacagctaagctggttggttgaatcactgtcccatgatgaccagcatgattgtacaatccactgacaattccactgcccgaatggaatggtgtgaaccagcctgttttgcaatttgaactgtgtgcttggacaacgtgttgtccttctagctgagcaactttccaatcaatgcactgcccaattagatcagttagttctaactgcattgcagttagaacaatcatactgcctgatgtactacaaccagatggtctcatggaccacccaactgtgacatcgtacgtcatccaccttttttctgtctgtactgctgactgtggctgtatgtctaccacagcatcctactcatagagtatctgattatatacttaattcaatatcacactgttctgcttttccatctaacattcatctgattttcttttttgagacagagcctcactctgtcgcccaggctggagtgcaatggcgaaatctcaactcaccgcaacctctacctcccgggttcaggcgattctcctgccttagcctcccaagtagctggaattacaggtgtgtgccaccacgcctggctaacttttttgtatttttagtaaagacggggtttcgccatgttggccaggctgatctcaatctcctgacctcaagtgatctgcccatctcggcctcccaaaatgctgggattacaggcgtgagacactgtgcctgaccctgattttctatatatatattttgaaacaggaccttgctctgttgcccacgctggagtgcagtggtgtgatcaaggctcattggagcctcaatctccctggctcaagtgatcctcctgcctcagcctctcaagtagctgggactacaggagcacaccaccacacctggcttattttttctatttttggttgagatagtgtctcactatgttgcccatgctgttctcaaactcctgggctcaagtgattttcccgcctcaacttcacaaagtgctaggattacaggtgtgagccaccatgcccgaactgacctggtttcctagcagtacgattgtgttggtaagtattttgttggtgtatagctttccttctctctcatttcttaaatgcctgattgtacaaccatcctcctaccagtctgatcgtaaatctggccttttggctgtataactgctggagtatctgatacaaccaccacaccgtctaactgtctgatcagatgataatcctagagaaggaatggttttatacctgaacacctttctggctgtcttactcagtgctgggctaggtgactatagcagggataagattattccatagctccactggttcgccgtctgaggatatgtctctgctgtcccctggatagaactccctattttttctttttgagacggagtcttgctgtgtcgcccaggctggggtgcaatggcgtgatctctgctcactgcaacctctgcctcccgggttcaagtgattctcctgcctcagcctcccgagtagctgggatgacaggcatgcgccaccacgcccagctaattttgtatttttagtagagatggggtttcgccatgttggtcaggctggtcttgaactcctgacctcaggtgatccgcccacctcggcctcccaaggtgctgggattataggtgtgagccactgcacccggccggaactccataattatatcactgtgtccccttctcagcagctccattcttcccctcacataactgcctgctgactttctggataaaaagacactgctgcctcaagggaaagatactgtgtagccctctgcccatccccagaaagaccgatgtacctctcactccacaggctgtgtccaggtgggggtgacgcagagaggaacgcttgtacaccacatgtggtccactttcctccgggctccgagaacccttgggcccaccgtgcaggggctcaatcaggtactcttcctcgtctgccacgatcaggccgtgctgggttttgagaagtgggatagaaagctctcaggatcaggttctggagcttaggacccctgggaccttctctctgtctttatgatttcattcttatcaggtttattttgctatttctttttttttttttggcataggtaattagtgtccatgctatttatttatttatttatttcttcttttggagacaaggtcttactctgtcatccaggctggagtgcagtggtgcaatcgtagctcactgcatcctcaacttcctgggctcaagcgatcctcctgcctcagcctcccaaggatctgggactataggagcacaccaatatgtttggctaatttttaaaatttttaatttatttttcatagagatggggttccactatgttgcccaggctggtctcgaattcctggcctcaagtgatcctcctgcctcggcctcccaaagtgctaagattaaaagcatgagtcagcatgctcagcctctaatttctttttattttaaaattatatatgtgtgtatgtgtatagtatgtatgtatgtgtatacatacacatacacatatataattatatattatatatatttataaatataaaaaatatatatatatatttaaagagtcagggtcttgttctgtcacccatgctggagggcagtgttgtgatctcagatcactgagacctccccctcctgagttcaactgattctcccacctcagcctcctgagtagctaggattacatacacataccaccatgcctggctaatttttatatgtatttttagtagagatggggtttcaccatgttggccaggctggtctcgaactcctgacctcaagtgatctgcccgcctcaccctcccaaaatgccaggactacaggcataagtcaccatgcccagcctcgaattttttgagattgatgtttagctcattaattttcagccttacctaaggctatacattttcctttaagtactgctttagctgcatccccaaagcactgattggctcaaaacacttaaaaaacatcccactatcattccttctctgccctctatgtagaagtgtttttcttaacttccaaacttatgggcatttccccccgcgttccagaatcctcagctcaccaggcctccacaggtgctgatggccacatgggagctgctggcctggccctgcaggtgaccagcgtagaggcagtggggccgggccgccctctgccaggccaggccctcccgtgtccagtactccacggagacgtgccctgccagtagacgggagctgcgggtcaggttcagcaggaagtgggtgctgggcgaggccactttgtagaagaggcgggactcggctgtggcccccgtgccgcggcgctgcctccggggaggaggtggcgagaaggccagcagtgccccgttgtggtccacgcgggtggggaaggcgatctcatagctctccagactggacaggaactcatctgtgggtgagggtcagaggcctggggtgggccctggtcttattggacccctgtgtcctggctgttaggctgctggagcaagtgatgctggcctcactgacccccgaaatccagggagttggctgcaaggctcccgcctattgaccccagggccttcccccattgacccccatcccagccccctgatgcctctttctgttggagcccaactggtctcttacatttttcgctccctccccaccgccaccaccagacttcccctaccttgagaccggaaggcgtgcgtgacctcgaacatgaggcccagccccagggcgagggcccagcggaggatctggcaggcgggagccatagaggccacgtgtccacatgtctctccccagccccggctgccggcagcccccacagtgccgcctcccctgttcacagccttcgcagcatcaccgggctcctgggaggggggagccaggtaagggggcgcctggtcccgctgtccagcacaaccaatgccaaggccaatcatggccaaagcttttcacctgactctgaagattctgaatgcattttctcactcagtcactcccctctccccacctccccttccaatccttcctacactcctacaagaggacagacagggactgggacgctgggagtatctcctatgtgccagctactggccctagttttcacaccactgcatttctgttcttttgttaagagacagggcgttgctctgtcacctaggatggagtgcagtgttgtgatcatagctcactgcagcctccactgcctgggctcaaataatcctcctgcttcagcctcccaagtagctgagattgcaggtgcaagccaccacacctggctaatgtttttgtttttttggagagacgggggtctcactttgttgcccaggctgatcttgaactcctggcctcaagggatcctttcacctcagcctcccaaagcactgggattacaagcatgagccactgcacccagcccaccgtatttcatttccaaaataactgagaagtcatggtcatcacgctcttttttttgagatggagtctcactatgtgacccaggctggagtgcaatggcgcaatcgcggctcactgcaacccccgcctcccgggttcatttgattctcccgcctcagcctcctgagtagctgggattacaggcacgcatcaacacgcccagctacatttttgtatttttagtagagatggggtttcaccatgttggccaggctggtcttgaactcctgacctcgcatcacactcgtatccctcatctttttatagatgaggaaatagactcaggagtgatagagtttgccgtgggtcacattgctagaaagtggtagaacctgggttcattcattgggttatagcctccggtggagggtggacgggggcatgacagccaggcatgctaaggatagcaacccctacttgccctagccctgtggggttccatctcttaggagtgacagatgacagtcaagtgaatggagaatagttcagattgtgacatgttctctagaaggtatcaatggggagactgggaagcagaggttcaaagcataagaaatcaatggtgtgaagagacaggcgaaggtgcaccaggaggggaaacagcaaggtcaaaggcctggaggttgggtagagcctggcatgagcccagacagggtgggtgcaggagagcaaggggaggctggcatcagaggcacttgaagggggggctggtcggtgtgaattttcaagccagattagagctaaggctcccacccatgcatctactgtcctgggccctgtctttggattatctgaaatgggtagcaccattcaagccagatttttaaagctaaggctagtattccagtcctgcagactttcatatgcccacccacgcacccactgtcttgggccatctttggattctctgcactgggtagcactattcactcccacctcccaggcctctcctccaccctgtgtttctgaccccgtcctccattcagattctttcaaggctccaagccagcccgccccgcaggtctcagtctctccagcatctgccccaggccagcctgccgcagacaccactttgggccaccaccctgtgccaaaccctcttcccccaccctgctgtctccaccctcctcctcctctgtgcaaaatcccttaatcacagagtcttgttttctttgcagcccagccaagtctgagagtccaagtctgagagtcaatccccaaacagggcagttcagccccaagggagggagccaggtttttgccaagttgctgatggaccaagaagcccacattccccacttctgcttggatccctctagtgacggggagctcactcacagatattctgtgacccctgttgcactctttagctgggctaatgtccattccttctgttgttgttctctctctctctctctctttttttttgagacggagtctcactctgtcgccagggtggagtgcagtggtgtgatctctgctcactgcaacctctgtctctcgggttcaagcgattctcctgcttcagcctcccgagtagctgggactacaggtgtgcgccaccatgcccagctaatttttgtatttttaggagagacggggtttcactatgttggccaggatggtctcgatctcttgacctcatgatcagcccgccttggcctcccaaagtgctgggattacagccgtgagccacagcacctggcctctctctcctttttattttttttaccttttgggggcttcggttggtggagtagtgttgggcccctgtacggatccttccctcgcctgctccctgcacctgggcctccctctctgggccttggtttcttcttctttggagcctgggcagggaggggtcaaagaggaggagccgggctggtcttcagcactgagctgggtctgtagttgagggatcactgaggaaattctgaccctctctctgcccctggagaacttcctcttagacttcttctttcttctgttcctaatgaaccccctccaacaaaaacccacctcctctccctctccctctcttcttgcttcttcttccctattccttctttggaagtgtcagccaactcccagatcaaggcccttcctggttgggcacctctgacccccgctcctgccctgagccacccctgaaaggtaggaacattctcattgcaagtgaagcagggacctcacccctttctcccactggctccctccctcctctcctgttcttgcattgccaggcctggtgccccatcctcctccttcaggggctctctctggtcttgtctagagtgtctttgggtctgtcctggtccccctaagaccctcagtcctcatcactgtcctctgaagtgaggcgctcctcccaaaaccctcacacccccttctgtgctttgggctcaggtggggtgtgagggacaaggtttgggacattgtggaaggacccagcacagggggtgaggacaggggaaggggactcacctgtgcacagtgtatggggtagggggaggaggggggtctgcagaaggctcacaggcgtctgagctgggggtccagcccacagggtggtgtcgaggtgtgacacagcccagggcaccaggtggtggggggacatgaacaaggcagtgggtctggggccaaagatgaagcttgagagaggctcagggacagagacggtggtggccaacaggatgtcagtgagggatctgcactgtggcgtgtgtgtgtgactgcatgtacattacagcatgtatgtgagtgtgtgtgaccctgtgtgtgattgtgagcgtgtgactgcatgtgcattatggcttgtgagtgtgtgtgaccctgtgtgtgtgtgtgtgtgtgtgtgtacccaggcctggccattcctccagcccctcctccccgaaggcaggagggaggtggccagcgtgggggagggtgccaggcctggaggaggaaatgcctccgggaaatggaaatggcttagaaacagaggctctgtcccatcccatcccatcccggggatcctgaagggaccctaagctccacacccaaacctctccggccaggctgcggggacagggccgacggaaggtcccccgtggaggccaaggccgcgtctccccaggcagaggccccagcctgccggcctcctcccggctgcacatctggccgggccggcaggaggcagtccctgccggagagcagacaaaggcccagccggggcctgcgggaggagggggccggcgcccgggctggtcccccacaaccggccgctaattaaaggccctgagcccgaccgctggagacaccctgagacagacggctgtggcctcactgaccaactcaggggaagtgggcggcgccactcccacacccagacacacaaacacacactggcagcgacacacaccccgcgcaaccagagaccggcgctcgggcactgtagacccacaaaagacgcaggacgcctccaccgcagacacacacgccgacaggctcagtgcacactcacacacccggagacaaacacatggagacacacaaccacacactcccagacatgtgtaaacacacactcatttacacgcgcacacacgggacaagacagagaaacacgcggacacacaaatacacgcacccggggcctacacaaacagaaacacacacatacatacacagacaacccaaggagacagacacacaggcctacacgctgacacatacacactcatttgcatgctcacaccaaaccagagacaaactcacaagtcccacagacctagacacccccccacaccagacacacacacacaggtatttacacactcatcacggtcagagacaaacgcacacatgcttggggacacacacacaaacccagacacacacacactcgcctccagatctgcgcgcacatagcaaacccctatgcgcacacactgtccaaacacacagacacacaagagactcatccccaggcactgacacacacatgtaatgcacaaccactctgcccctacgtggacggacacacacacacacacacacacacagcgcaaacaaacccacggcaaccccgggcgtgatcagtggcgcgcgcacttgcggacctcaggcaccgaccggagtcgcacagcgggatgccctcccccatccagggcaccacagccccacgccctcacagcccgatgcggacacacaaagtcccactgaatcacgcacccccgggccccccgcccgcgccgctacctgcgccgcgcccggggcctccgcgccgtcgccgccgctgtctcgccgccccgcgcgcgcaggaagggagggagcgagcgagcgcggcggcgtggccaggggagggggcgcggggaaggcacttcctgagccgcctgccagggttataaaaaaacccccaaactgcgcgcggccagaaaccccgcccgcctgccgccgcccggcctgggccgcgggctggaccccagccagggacccgggaactcgggccgccccgcccgggaccagcgcccccgccgcgtgggagggggctggggaaccgcggggggcggggaggggacgaagcgggagaaatcgagtggcggcggggagaatgggtgggggaggggagaaagaatcaggtgggggatggggatggaggcagaattgggtgggtgggggttcggggaaagggaggaagagaagggagaggttgggggagggggaagtttgaatgggaaggggtagggggagatggaggcctggaggaaggggctgagtgaggtggggggaggtgggggcctggaggaagggctgagtggggtggggggaagtgggggcctggaggaggggctgagtggggtggggggaggtgggggcctggaggaaggggctgagtggggtggggggaggtggggcccttgaggaggggctgagtggggttgggggaggtggggccctggaggaggggctgagtgggttggggggaggtgggggcctggaggaaggggctgagttgggttgggggccacgggaaggaatggaggggggtaaggaatggggctggaggggggatgggagcatgagatgctggggttggggaggggagagcccacttcctcgccagcctctgcggcatcaacaacagctgttatttattgagggctgggcctggctcaaacaagcatttattgggcgcctcccgtgtgccaggcacggtgcccggggcgggaaataagtcccagctcggccccgccctctccgagctctcaggggggtttgatcggtcctgggcctggccttggtctctgtgccttaactcctttgcggtgacgtaggctcagctggtcccatttcacagatgaggaaactgaggccacagagatggggagagtgaaaattctgttggaaccggagccctcttggtcttggtcactctgggtctcgctccataaaatgaacgaatgcgtgaatgaggaggacctggatggttggggcagggctgggatttgaatcccaggcgcctggtacagtgcctggttccagggaagggcggtgacccccaggcctcacaattgcaggcatttcccaggaacgcccccccccagggagctggccagagccttggccttggctttgtctgagtctgggtttactcatccacacagtgggggtaataacagccttcccagggctggagtagggggtggaggaggggtttcattctgcagcaaagatttgttgttatgtgctgggttccagggacacagctgagaccaggagggcagcttcccaactcggaatttttccttttgaacttggaatgacctgtcattactcacgcatacagcaggtgctgcataaataccagactcctggagttcccaccacactaccttaccccaacctcctgggactccaggctagaccagaggtgcagcccccaccctcctgtttgctccccacactccctccttcccaccagggcctctcgggcccccatttgaggaacgagtctaagtcagccatttctggcctctgttagctgttcttctactacctatggggccctctttctccatcaaagaggtggtggcttcctttctttgctgtagatactaaaggctcccactgttagcctagtgactggtccagccacctgtccctactttttttttttttttttttttgagatggagtcttgctgtgttgcccaggctggagtgtggtggtgtgatcctggctcactgcaacctccgcctcccgggttcaagcaattctccagccccagcctcccgagtagctgggtttacaggcacctgccaccatgctcggctaattgtatttttagtagagatggggttttaccatgttggccaggccagtcttgaactcctgacctcaagtgatccgaccaccttgacctcccaaagtgcttggattacaggcgtgagccactgcacccagcccacctgtccctcctcttaaggatgggtggtttccagaccgcactgggaatttcagggttgctttgagccaggcgctcctaggttctggcactcctaggttctggcactcctagctgtgaaacctctcattataattactctgtgaaactttgacagttctacacccactacttcccaccacagccccagacttcactggggtgggggggtctctttatttcctcaagggcgtgtggccctctagggcctggccgattgtttaggggatgcaccttccccacctgaagcctccagtgagctgtgttgaggcatttgtgatgagtcttgggaaacaaacttttgtgtctttttctttttcctttttttttttttttttttttgagatgcagtctcgctctgttgctcaggctggagtgcaatggcgcgatctcggctgaccacaacctctgcctcctgggttcaagcaattctcctgcctccgcctcccgagtagctgggactacaggcacgtgccaccacgcctggctaatttttgtatttttaggagagatggggtttcactatccttggccaggctggtctcaaactcctgacctcgtgatctgcctgcctcggcctcccaaagtgctgggattacaggtgtgagccaccacacccggcccttttctgtctttttcttttgagacaagatcttgctctgttgcccaggctagagtgaggtggtatgatgatagcacactgcagcctcgaactcctgagctcagatgatccttctgcctcagcttcctgagtatctgggaccacacatgtgagccaccatgcccgattaagttctttttttttttttttttttgagacagagtcttgctctgtcgcccaggctggagtgcagtggcgcgatctcggctcactgcaacttccacctcccggattcaagcgattctcctgcctcagcctcccaagtagctgggattacaggcatgagccacccacgcccggctaatttttgtatttttagtagagatggggctttgccatgttggccaggctggtcttgaactcctggccttaagtgatccgcccacctcagccttctaaagtgttgggattacaggtgtgagccactgtgcctggcctcaaattgtagagacagggtctctctctgttgtccaggttggtcttgaactcctggcctcaagcaatctccctgccccggcttcccaaactgctgggatttacagctgtgagccaacaagtctggcctgacttctgtgtcttgagtgggatggatttgaagctgagtccctatcttagacaacagagggaggcctcttataagaatgaagccagctgggaatgtgggttcactcctgtaatcccagcactttgggaggccaaggcaggtggatcgcttgagctcaggagttcgagaccagcctggacaacatggcaagagcccatctctattaaaaaatacagagaaatagccagggcgtagtggtgcatgcctgtggtcccagctactcgggaggctgaggtgggaggcttgagtccaggaggtggaggttgcagtgagctgagattgggccactgcacttctgcctgggtgatggagtgagactctttctaaaaaaaaagagaaaaaaaaagttaagtaaataaataaaataaaaataaaaaatgaacgaagtcaccagatggagcagatggaggagagtaatggccttggggccatcatcatttgagccctgagcaagctgttcctgaagcccatagatgggctttaatccagtcacactctttattgagcactatattgtatcaggtgctgatccaggtactggggacatggcaggaacaacaatctccatcccacaaaggtcaccgtcctgcctcaaggcctttgcacttgctgttccctgtgcctggaacaccctccctccccaacccccttattccatggccagctctgttttgtctttgcaaatttttttttgtttttgaaacagagtcttgatctgtcacccaggctggagtgcagtggcgtgatctgtggagtgcagtggcacgatctcagctcactgcaacctctgccttctgggttcaagcgattctcctgcctcagcctcttgagtagctgggattacaggcgcatgccaccacgcctggctaatttttgtatttttagtagagatgggattttgccatgttggccaggctggtctcaaactcctgacctcaagtgatctgcctgcctcagcctcccaatgtgctgggattgtaagcgtgagccactgcacctggccatctttcaagttttgactcaaacatcgtttccttagggaggcctgcactgatcccctcacttcaacatgacaccccaacgggcttcctttcccactccctgatttattttactcttagtgtgagtcactactggacctactctatggaatacttatatctgctggcttcctgtgtctcccaccggaatgccggctccgtgagggaaggggtttttgtctgtgtggtccacagcagtatccttggtgcctagcagggtctcacccacagttagtgcccaccgttgaataaataggctcactagtaaataaaagggctctcagaagaggtgacaatgatgttgtggtttgaatgttaagaaagagagcctgttactggaaaaaaaaaaattagctgggcatggtgatgcgtacctgtagtcccagctacttgggaggctgaggcgggaggatcacttgagccagggaattcgaggttgcagtgagctgtgaacatgccgctgtactccagcctgggagacagagtgagaccctgtctcaaaaaaaaaaaaaaaaaaaaaaaaaaaagaggcagtgtgagggtgaaggcgttctaggaggagtgcacagtaactgcaaggttcctgtgcccattctctttttatttaaaccagtctggactgacttaaaagaaaaaattgtttttcagattctttgcaacctttagaacccggagtggttgtgcctagggatgcagtactgcagctctgccacaggagggcgcaatggaactccattgttgcccttggaaagtaggaactaggaaaatagaagtaatgataatcggcagggcgcggtggctcacgcctgtaatctgtaatcccaacattttggaagtccgaggcgagcgaatcacgaggtcgggagtttgagaccagcctgcctaacatggtgaaaccccgtgtctactaaaaatacaaaagttagacgggcgtggtggtgtgcacctgtaatcccagctattcagtaatcccagctactcaggaggctgaagcgagagaatcgattgaacccgggaggcggaggttgcaatgagccaaggtcgtgccactgcactccagcctgggtgacagattgagattccgtctcaaaaaaaaaaaaaaaaaaaaaaaagaagaagcaatgataatggtgataatgatggtgatggcgatggagcaggggctgtgaggtctgtcttaacttcacgacagccttacaaggtaggtgcccattttgcaactgaggaaactaagcccagagaggttgagtaacttgttcaaggtctctcagctaggattggtagaaccagaatagagcaaccaaggtaaaagtcacccataatttgaccatttagggggaaggcaggtgaactttgaggctgaagaccttcccctaggatcgggggaggagggagtcctgggggggccctgggatcattgtgctgagggctgactcttttcccagtgggtagagctcccatctctctctttctctttttttttttttttttttttttttttgagacaaggtgttgtcctgttgcccaggttggagacgagtggcacactcatgactcactgcagcctcaatttcccgggctcaggcaattctcctacctcagcctcccaggaaactgggactacaggcatgctctattttgtctggctatttaaaatttttttttcttgtagagatggggacttgctatgttcaccaggcggtctcaaactcctgggctcatgagatcaccccacctcagtctcccaagtagccgggactacagcatgcgtcaccatgctcgcttaatttaaaaatttttttttgtggagatggggtcttgctgtgttgcccaggctggtcttgaactcctaggctcaagtgatcctcctgccttggtctcccaaagtcctgggatcacaggcataagtcactacacctgacaatggagctcctaacccttagcccatctgctgggcgttttcccccagctctgtggcttggtatcttcttaaatgtggagataaatcacgccttctcaaggtcatttgaaatcaaaattcatctccaagtttcaggggcagggaagacttaggcagttaaagacggggaggaagggagtttcaagctgggggcatggcctgcccaaaatcctggacgtgggagagagggaagggcaggtctcagtttcctatgagattctcttggagtgaatatttatttactcaaacccctcctggcagaggcaacgcaactctcccacccccaccccccttcctcttgaaattcaaaacacacatttggccaggcgcagtggctcacgccggtaattccagcactttgggaggcccaggcaggcggatcacctgaggtcaggagttctagaccagcctggccaacatggtgaaacccctgtctctactaaaaatacacaaattagccgggtgtggtggtgcgcgcctgtaatcccagctaatcgagaggctgtggcaggagaatcgcttgaatccgggaggcagaggttgcagcaagccgagatcgccccgttgcactctagcctgggggacaaggcgagacttcatctcaaaaaaacaaaacaaaaaacacattaatcggccttcatttggatatcacagataatcttatcttgcaagctgagcccagaatgatctgagggctgggtccacccccttcacccctgccccatgcagttttggggcccaaaaggattcggtggctgccaggtcagtgtcctacaacagttgaaagtccccatggccggaagcccccagctatctggaggtttctcaacccacatagtgcctaaatgttccacgtgcaacatacttgcctcaagcccctctagacctaaacctttacacctctgtaaggctggtccctctgtagcgtgatatttcacaactaacgtttcaccctccttcatcttttaatactgaggactgggggttcaaatcccaccttgccgatctttgtccattatttaaacttctccacacctcagttttctcatctggaaaatgggcttaatcaggtggctgtgaggattcaacactattaatggtaaagtgcttattaccatagtgccaggcacaaagtaagtggtagctattatgattagttctggttttgttgttactatttcttattttgttttgatttttaattttttaaagttaaacaattttttctttatctttttttttttcctgagacagagttttgctctgtcacccaggctggagtgcagtggtgcgatctcggctcactgcaacctctgcctcccgggttcaagtgattctcctgcctcagcctcccaggtagctgggattataggcacccgccaccacgtcagactaatttttgtatttttagtagagaagaggtttcaccatattggccaggctggtcttgaactcctgacctcaggtgatccaccagcctcggcctcccaaagtgttaggattacaggcttttttttttttttgagacagagtctcactctgtcgcccaggctggagtccagtggcgccttcgtggctcgctgaaacctccgcttcccaggttcacgccattctcctgcttcagcctcctgagtagctggggctacgggcacctgccaccacgcctggctaattttttttttttgtatttttggtagagacagggtttcactgtgttagccaggctggtcttgatctcctgaactcatgctctgcgcgtctcagcctcccaaagtgctaggattacaggcatgagtcactgcgcacggactgttttttttttttttttttttaaagagacaaggtctttcgctgtcacccaagctgaggtgcagtggcaccatcacagttcactgcagactccaactcctgggtacaattaatcctcctgcctcagcctcttgggtagctgggattacagacattcaccaccacaactggctaatttttaaaaattttttgtagtgacaaggtctcacctacccaggctggtctcaaactcctggcctcaagtgatcctcccacctcagcctcccaaagtgttgggattacaggcaggagccaccgcgcccaatctgtttttggtttgattttttttgtttattaatcttacttgctttttgttttgatttttaaaatgctttgtttattaacatttgtttgtttttgttttgatttttagaaatgtttctgtttattaatctttatttttctttatttggttttaatctttgtttaaatttttttgtttgtttttaaatatttgtggttattattattctactctgttctttccctgagcaagggcactggtctcatatccccaagaagggggtgtccaccttggaaaaagagaggcattttctggacccgaagttccacagtgcctacggggatagggaaggcttccagcaaaaacagctttgagagaatgtttttatttttattttttttgggatggagtctcgttctgtcgcccaggctggagtgcagtcctggtgcaatctcagctttctgcaacctccaccacccaggttcaaacaattctcatgcctcagccttccgagtagctgagattacaggcatgcaccaccatgcctagctaatttttgtatttttagtagagacggtgtttcaccatcttggctgggctggtctcaaactcctgacctcaggtgatctgcccgccttggcctcccaaaatgctggattataggtgtgagccagagagaatcttgtataggaaacaagtaggccgggtgtgctggctcacgcctgtaatcccagcacgttgggagactgaggcgggcggatcactaggtcaggagttcgagaccagcctggccaacgcggtgaaatcccatctctactaaaaatacaaaaattagccgggcatggtggcgtgcctgtagtcccagctacttaggaggctgaggcaggagaatcacttgaacttgggaggtggaggttgtggcaaggcaagatcgtgacactgcactccagcctgggcaacagagccaggctccgtctcaaaaaaaaaaaaaaaaaaaaaaaagaaagaaagaagtatcccagcccagagtctaggaaagagattttctgcgtggggagaggaagaatagagacttagggaggaagtctctggatgggaggctggagtgtgggcatggagaaaacctcaggcaggctggggaccaggtcacaacaggtgggctggacagctctgtgcaggtccctgaggccacatggagggagcagtgctggtgaagtggatagaaagggcggaaacagatcgtggagcgggcggtccctacaggtccctggtcccagggagcagacgtgaggtttgtgtgcctggcccaagtgtgaggtggatgctgtcacagttcgggggtggggggtgccccaaaccgcccaggtgtccaggctgcatgggacaggaggaagatgaggatgaggcaggaggggatgtttgattgggtgcagctgtgttgaggaggtctacgtgctgggtactggggagatgccctgtctctgcgacttcatgcaatgttaatttcttctgatccttctttgatatcctcctgactgcatccggtctcttctgggcatccctggcttcccggtctcagcccgtcccaggagatgctctgatcctgcttcacgtgtttcccgccctggctggctcccatcttggctcctggtgtgattatcccacagacctggcctggggttggcttcagtttcccctctgcagctggggcagatgcggtgcagctcccggcatcccccatgattttcctcgatttccccgcgctttgtgatttcgatgtaaacttcaaacactgctccctttcttgtcctgttctgggtgggcctctgtgccgcccctggtgcacctgctggggtggctgtctttgcaccttctggtcctgttctgccaccttgaccaccccagaggtttcaggggacacttggcagaaggtgactaaaatttcccatccccagctgggtgtggtggctcatgcttgtaatcccagtactttgggaggaggaggcgagaggattgcttgggcccaggagttggaggctgcagtgagctgtgattgcaccattgcattccagactggacaacaagcaagaccctgcctcaaaaaaaaaaaaaaaaaaatcccccacccctgagtgagagaccctggggtgtgacctccttaccccttgcttggggtggaggggtggtgagtgagcggggaggaaggtatcggactgcgggtccaacttcagaaaaacccgagttggcttctggggctccagttcttcatctagaaccagctgtctttggtgctgaggaccagagatgcccaagtggtttgcttgcccgggcatccatctcccagtcctccaaggaagtcatgcctggatggagtagcccttggccaccttttctggggtggcctgggtctggtagaaggggccaagtatttttttttttttgagatggagtctcgctctgtcgcccaggctggtctcaaggtcctgacctcaagcaatcatcttgcctcagcctcccaaaagtgctaggattacagtgagccacaaagtctggcctttgtgagcatttaaaaccctgccccaccagccctccaacaacgaccaggtgaagacgcagagagaaggtggccatctacaagtcaaggagagaggcctcagaggaaaccaaccctactgacaccttgaacttggacctccagcctccagaactgtgagaaaatgaatttctgttgttttagccaggtctgtggtgcattttcttggcagccctagcaagctcatatgcttttttttttttttttttggaaacagagtttcgctcttattgctcaggctggagagcatggtgtgatctcagctcactgcaacctccacctcccgggttcaagcaattctcctgcctcagcctcccaagcagctgagattacaggcacctgccatcacgcctggctaatttttgtattttagtagagatagggtttcaccatattggtcaggctggtcttgaactcctgacctcaggcgatccacccgcctcggcctcccaaaatgctggggattacagacgtgagccaccatgcctggctgctcatacatgttttaagtttgaatgatattccattgtacatgtagaccatgatttgccccctcttgcttccatgccagtgtcccctggagccgtctccctgctgtctcctgctgtatctgggctgggctgggacctagtctcagctgcaactgtctcccctgaacccccccgtctccaacaggctctgacctccagacccacccccccttccacagtccctaagccttttcctatctccacttttcagccacagaatctgagacccagattggaagctccttgtggtgagggttagattaaatatgtaattcttataagagacttagaatggtgcctggcacagaagctattattactattattattattttgtgtgtgtgtgtgtgtgtgtgtgtgtgtgtgtgtgtgtgtgacagagtctctctctgtctcccaggctggagtgcaattatatgatcttggctcactgcaacctctgtctcccgggttcaagcaattctcccgcctcagcctctcatgtaactgggatcacaggtgcccgccaccgtgcccagctaatttttgttatttttagtagagactgggtttcaccattttggccaggctggttttgaactgcagacctgtggtgatccacccgcctcagcctctcaaagtgctgagattacaggcaggagccaccgtgcctggccttttatttactatttttttttgagacagggtcccactctgccacccagaggctggagtgcagaggtgccatcataactcactgcaacctcagactcctgggctcaagtggtcctccaacctcagcctcctgagtagctgagattacaggtgcccaccaccatgcccagctaatttttgcatttttattagagatagggtttcaccttttggccaggctggtctcgagctcctgacctcaggtgatccacctgcctccgcctcccaaagtgttgggattacaggtgtgagccaccatgcccggccactctgatattattaattagctgattgattcaacaaacatttattgggcccctactctgtgccttgttcaggcagaagaagagaacaacatctccactctcatagcactagaaaaagacaaaagaaccaataaacgaatacacacagagtagattctctttacttgtggtagttctgttctttaatgtcgccatggacactgaattagggaacactaaactgttgttcctggggaaataaaaggttaggttcctatgactctctggtcacagcattttaatcaactgatcaatacataaccttggtttatatgtgttatttaatttaatttaattttattgagacagagtctcgctctgttgcccaggctagagtgcagtggcaggatcttggctcactgcaacctctgcctcccaggctcaagtgattctcatgcctcagccaccagaatagctgggaccacaggtgcgcaccaccatgtctggctaatttttgtatttttagtagacatggcatttcgccatgttggccaggctggtcttgaactcctggcctcaagtgatctgcccaccttggcctcccaaagtgctgggattacaggcgtgtgagccattgcacccggccctatatgtgtttatttattttttattttttgagatggagtttcgctcttgttacccaggctggagtgcaatggtgcaatctcggctcactgcaacctctgcctcccgggttcaagtgattcttctgcctcagcctcccgagtagctgggattacaggcacccgccatcatgcccgactaattttgtatttttagtagagacagggtttctccgtgttggtcaggctggtctcaaactcccgacctcgggtgatctgcctgcctcggcctcccaaagtgctgggattacaggcatgagccactgcacccggcctatatgtgtttatttttaaagacaccttgttaaatatatatagttgcttcattcacattgaactcatggctaacagcaagaccactcgcgcctgaatgaagcttctctaacacatggattttctctgtgagattcatcacagtcttctgtatactgtggtttgaatgtgtccccacaaaagacatgtgttggaaactcagtccccagtgcaacagtgttgggaagtggggcctaaggggaggtgtttaggtgatgaaggttccaccctcatgaatagattaggaacaatttgaaaaggggttgagtgctgggtacagtggttaatgcctgtaactccagcactttgggaggctgaggcaggaggatcctttgaggccagaggtttgagaccggcctgggcaacatagcaagaccctgtctctacaaaaaaaaaaaaattagctgggtgtggtggcatgagtctgtagtcccagctacttgggaggctgaggcaggaggatcacctgagcccagggaggttgaggctgcagggagctgttattataccactgcattccagcctgggcaatagaggaaaactctatctcaaaaaaaggggaggattaggctgggtgcggtggctcatgcctgtaatcccagcactttgggaggccgaggtgagtggatcacctgaggttgggagttcgagaccagcctgaccaacatggaggaaactcgtctctaccaaaaaaatacaaaattagctgagtgtggtcacgcaggcctgtaatcccagctacttgggaggctgaggcaagagaatcgcttgaacccgggaggtgggggttgcagtgagttgacatcgcgccattgcactccagcctgggcaacaagagtgaaactctgcctcaaaaaaaaaaaaaaaaaaaaaaaaaaaaagaggaggattgaggctatgagcctgatttttcttgttctctcacactctctctttgcccttccaacacatgaattttggggcacacgttcacaccatagcaccatctaatggagctgtggtaaggattagattaaatacatgattctggccaggcgaggtggctcatgcttgtcatcccagtgctttgggaggctgaggcaggagggttgcttggggccaggagtttgagatcagcctgggcaacatagcgaggccccgtctctacaaaaaacagaaaaagtagccaggcagggtggcacatgcctgtagtcccagctacttgggaggctgagatgggaggatcactggagccagggaggtcaaggctgcagtgagccaagattttgccactgcactccagcctggaggacacagtgagaccctgtctctgaaacaaaacaaaacaaaacaaaaccaaatggaaaagtgtgatttttctttttatttcttttattttttaatttttgagacagagtttttgttctgttgccccagctggggtgcaatggagtgatctcggctcactgcaccctctgcctcctgggttcaagagattctcctgcctcagcctctcgagtagctgggattacaagcatccaccatcatgcctggctaatatttgtatttttagtagagacgaggttttaccatgttggccaggctggtctcgaactcttttttttttttttttttttttttttttttttgagacggggtcttgctctgtcgcccaggctggagtgcagcggcgcgatctcggctcactgcaagctccgcctcccgggttcacgccattctcctgcctcagctcccgagtagctgggactacaggtgcccgccaccacgccggctaattttttttatttttagtagagacgggatttcactgtgttaaccaggatggtctcgatctcctgaccttgtgatctgcccgcctcggcctcccaaagtgctgggattgcaggcatgagccacccgactggtctggaaaagtgtaatttttctaagaaacttagccatgggatgatgggacaagaaggcccttgccaggtgcaggccccttgaccttggacatcccagcctccaactgtaagaaataaatctctgttcttcataaactacccagtctatggaattctgtgatggcagcacaaagtgaaataagacattgtgcgcagggacacaggactccacaccagcattgtgcttggagccaatgtgaacagcaacatcaccaaaaaaaaaaaaaaaaagcacaaaaatgaaaaaaaaaaacaaccccaaaaacccaaaaaaacccagcaccactcgatagactccaaaagggcacttgtttgtatgatgagagctgagacaggaaggcagagtgtcgccttgtgtgacctcagctggggacaggtgtgtagcgccactcaaagtttttgctgctccatctgcacatgactgagaatggctttgagaaccccaccagtaatgatttgggggttaaatacattttagcaagcaggccaatttgttttgttttgtttttgtttttttgatgctttgtcacccagggttggagtgcagtggtgtgatctcggctcactgcaatctccgcctcccgggttcaagcgattctcttgtctcagcctcccaagcagctaggattacaggcacctgccaccacgcccagctaatttttgcatttttagtagagacggggtttcaccatgttggctaggctggtcttcgactcctgacctcgggtgatccgcctgccttggccttccaaattgctggcattacaagcatgagccaccacacccggccaagcaggccaatttgtgatgccagaatccatgaataatgagtatcaactgtatcatattacaggtggaagtgaatgctgtgcgggaaataaaaggctgggttgaaaacagactcacgcctttaatcccattgctttgggaggctgaagtgggaggatcatttgaggctaggggtttgagaccagcccaggcaacatagcaagaccatgtttctgccaaaagaatgttttttagaagaatagctgggtgtggtggcatgtgtctgtagtcccatctacttgggaggctgaggcaggagaatcgcttgagtccaggagtttgaggctgcagtgagctatgattgcaccactgtactccagcctgggtgacagagcaagaccctgtctctaaaaagataaaaataggcctggtgcggtggctcacgcctgtaatcccagcactttgggaggccgaggtgggcagatcacgaggtcaggagatcgagaccatcctggctaacatggtgaaaccccgtctctactaaaaatacacacacacacacacaaatagccggacgcggtggccgggcacctgtagtcccagctactctggaggctgaggcaggagaatggcatgaacctgggaggcggagcttgcagttagcggagattgtgccactgcactccagcctgggggacagagtgagactctgtctcaaaaaaaaaaaaaaaaaaaaaaagataaaaacaggctggacgcggtggctcacgcctgtaatcccagcactttgggaggccgaggctggtggatcacctgaggtcaggggttggagaccagcctggtcaatatggcaaaacctgtctctactaaaaatacaaaaattagctgggcatggtggcacgcacctgtaatcccagctacttgggaggttgaaggagaattgctgtaaccaggaggcagagattgcagtgagccgagatggcagcactgcactccagcctggtcgacagagcgagattctatctcaaaaaaagagagaaagaaaaaaaggataaaaatacataaaatgaaagaaaagaaaacagggagacaaggggagagagtgtatgttagttacctaggactgctataacaaaatactagaaactggtgatttttgacaatagaactttattgtacagtttgggagaccaggagtccaaaatcaaggtgtcgacagggccatgctccttctgaaggacccttccttgcttctccctggcttctggtggtggccagctatccttggcttgcagctgcatcactccaatctcagcttccgtcgtgtagccttctttgcgtgtgtctgcctctgtttctgaatttcctccttcttcttttttttttcctttttgagatggagtttcactcttgtcacccagcctggagtgcaatggtgtaacctcggcccactgcaacctctgcctcctgagttggagtgattctcctgcttcagcctcctgagcagctgggattacaggtgcccacaactctgcctggctaatttttttgtatttttagtagagacggggtttcatcatgttggccaggctggccttgaactcctgacctcagctgatctgcccacctcagcctcccaaagtgctgtgattacacaggcatgagccaccaagcctgccatttccctcttttttttttttttgagatggagtttcgctcttgttgcccaggctggagtgcaacggtgcaatctgggctcactgcaaccactgcctcccaggttcaagtgattctcctgcctcagctcccaagtagttgggattacaggcacccgccaccacgtctggctaattttgtatttttagtagagacggggtttctccatgttggtcaggctggtcttgaactcctgacctcaggcgatctgcccaccttggcctcccaaagtgctggaattacaggcgtgagccactatgcctggccattttcgtcttcttataaggacacgagtcacattggattaggacccaccataacgcaggaggacctcatcttaagttgatttcatctgcaaagactgtatttccaaataaagtctcattcacaagttccagatgggcatgaatttaggggaggggacactattcaacccagtccagggggctcttttagagagggagttcatggaagcatggaaggcttcttggaggaggcaatatatgatcagaggcctgattgaagtcaaggggatctggggcaggagcattctaagtggagggaacaacgtgtgcaaaggtcttggggttgggctgtgcctgttttgttatctgttctggcatcataacagggtctgtgtgtacagctggaaggaagtgagttgatgtgggagaggtgaggacagggaggtgacagggacaggtcatgaagggccttgtgggctgcaggaaggacttgggcttttaccctgaggaggtgggagccatggaggactgtggacagaggaaggatgtgagaccccagagaaggacaagacagcacaagggcaggctagggtccgggtttggtatctcacagaaaccccacaatctcctggtgttggacactttatctcactcagataaaaatacataaaatgaaaggaaagataaaaataaataaaaagaaagaaaggataggccaggcacggtggcttacgcctataatcccagcactttgggaggccgagtcgggtggatcacctgaggtcaagagttagagaccagcctgaccaacatggtaaaaccccgtctctactaaaaatacaaaattagccaagtgtggtggcacatgcctgtaatcccagctacttgggaggctgagacaggaaaattgcttgaacccaggaggcggaggttgcagtgagccgagactgtgccattgcactccagcctgggcaacaagagtgaaactccataaaaaaaaaacaaagaaagaaatgataaaaataaattaaagaaaagaaaacagggagagaaagggagagagtgtatgttagttacctaggactgctataacaaaatactacaaacttccagatgaggtctggtgagtttaactccccaggatcacacaattgctcagtggtagatgcacagttcaaatccacactggtgtgtggcatcaggaataacctatgagagtgttcatagtgtccatgaacattgtattcactagcttcaaactcctgtcactgatagttatttatttatttttgagttggagtctcacactgtcacccgggctggagtgcaacagcatgatctctgctcaccgcaacctctgcctcttaggttcaagtgattctcttgcctcagcctcctgagtagctgggattataggcacgtgccaccgcgcctggctaattttttgtctttttagtacagacggggttttactacgttggccaggttggtcttgaactcctgagcttgtgattcacctgcccgggcctcccaaagatctgggattacaggcgtgagccaccgcacccagcctatcactgatatttatgatgtcacctccatggcactttgttggttgacaatacctgggatatctccattatagccctgttcgtgggcacagagttctctgccatggctggggactaggaagtgggaaagagctctaggggaacctgagggcttgggtggaagactggagagccaggaggagcaaggagcaggaagcaaggtggtaatgatgagaggctgagtcttccttcccatgccttgggtgggacatttctggtctctgacacaggagggcatgcagacctgggttaggctcctctctcccccacacaggtccggttggatcagcttattccccctgcagcttaactacctccatctcccttctgggatctcatgattgcctttaattggggccttggatgcccgggtcgtgttgcatggaactgcggccaagtgaggggattaagcaaagctgactaggatcgtttcatgcagatcttttcagagcctttaatagacacctgtgctttgcacagctttctcaaacttacttaactcctttgatattttttcctctgtagcattttggggtaccaggggtttctggaagggatacaggaatcattgctttaactcaaagagggtgcctgaatggtggaatttcaggcagggacttctggctaagcatcaaaggtttcctcctgctcctccctctctgctttcccttcccaggacccgggcactgagaacaaggctggcaccccacagctctctcaggggtggcccagtggggttgcaaattctaggcaggccaaattaggagctcacagggaggctggagggggtcagcccaggcagggctgggggctgggcttgggatgaacagggggactgaacagagaggcagcattctgaactggagttctgtgcctgtcccttgatctctggggggtctggaggcaggcgtgtcttctgggaaggcagcggagtcccctgggacaaagcccagggattagctcagtagacaaacatctgagtcttggccccctcttcccccgagtccagggtcacagtgggaggccgcagattggccctgttcttctgaaagtaaacaggcagtgctggcctggcttcccctacatccagccgccaggccttcgtgtccagcccctttgtgcggcggctccagcctctcagcctcctggcctttcactttctgcctcctccgtctacacccgctgacctcttgaagcgtctctagtgatggggaccctgggggcttggtcactccagtcctcgcttttgtgtgtgtgtgtgtgtgtgtgtgtgtgtgtgtgtgttttgtttgtttgtttttttgagatggggtttcgctcttgttgcccaggctgcaatgcagtggctcgatctcagctcactgcaacctctgcctcccgggttcaagcaattctttcgtctcagcctctccagtactgggattacaggtgcctgccgccacactcggctaatttttgtacttttagtagagatggggttgcaccatgttggtcaggctggtctcgaactcctgacctcaggtgatccacctgccttggcctcccaaagtgctgggattacaggcgtgagccaccgcgcccggccgcccttgtgttttattactgggatgctctagaggagccagagggaggcaggttcagggctgactgccccgccatacagtgtgtgtgtgtgtgtgtgtgtgtgtgtgtcagggggttatttttaccgctgttgtgtcagagacttgtgaaccagagtgactccatcttgaataggggctgggtaaaatgagcctgagacttactgggctgcactcccagacagttaaggcattctaagccacaggatgagaggggagtttggcacaagatacaggtcataaagaccttgctgataaaactggttgcagtaaagaagccggcccaaacccatcaagaccaagatgatgacatgagtgacctctgattgtcctcactgctacactcccaccagccccctgacggtttacagatgccatggcaacatcaggaagttaccctctatgctctaaaaacgggaggtatgaataatccaccccttgtttagcatatcatcaagaaataaccataaaaatgggcaaccagcagctcttgtctgtggagtagccattcttttattcctttttttttttttttgagacggaatctcgctctgtcccccaggctggagtgcagtggcacgatcttggctcactgcaacctccgcctcccaggttcaagcaattcttcttcctcagcctcctgagtagctgggattacaggcacacaccaccatgcccagctaatttttgtatttttagtagagacagggtttcaccatgttgtccaggctggtctcaaactcttgacctcaggtgatccgcctgcctcagcctcccaaagtgctgggattacaggcatgaaccactgcacctgcctttttttttttttttttgagacagagccttgctctgtcactcaggctggagtgcagtggtgtaatcttggcttactgcaccctctgcctcctgggttcaagggattctcctgcctcagcctcctgactgattgagattacagatgtgcaccaccatgcccagctaattttttgtattttcagtcgagacggggttttaccgtgttggccagactggtcttggattcctgacctaaggcgatgcacccacctcggcctcccaaagtgctgggattataggtggaagccaacgcgcccggcctcctttacttccttaataagcttgctttcactttactccgtggactctccctgaaatctttcttgcgggggacctaagaaccctcttttggggtctggatcgggacccttttccagtaaaagttggtgttattggcagtgaggtagggaagctgcggctaagctgaggctgcacagggaaggtgtcttgaccttgaacttgacaccttgaccttggacccttgcctaggctctgagggccagctcctttccctctctctaccttcccccacctctggctcttggaagtgcacctgcagctgctgtgggaggagccctccagccgccctgaggatggtttcctgcctcccttcctgccccctctgaagaccaacttagctatgcccaactcagctcttgtcctgggacaaggccccctgcctcctggtcaagggagcagggtcctggggagggagagacagatgtcgaggctggacaggaggttgtggaaggggaggaagtggatttgggagtatagctttctttcttactcagttatcattagtataacttttctcccttccttccttccttccttccttccttccttccttccttccttccttccttccttccttccttccttccctcccttctttccttctctctctctcttttttgctttcttgcttgctttcttgtttccttttttttttgagatagagtcttgctctgtcacccaggctgcagtacggtggcgccatctcggctcattgcaacctccacctgccaggttcaagcgattctcctgcctcagcctcccaagtagctgggactacaggtgtgtgctatcatgcccagctgatttttgtatctttggtagagaaggggtttcaccatgttggccaggctggtcttgaacccctggcttcaagtgatccacccccttggtctcccaaagtgttgggattacaggcgtgagccaccctgcctggcctcttttttttttctttttgagacagggtttcactctgttgcccaggctggattgcagtggtgcaatccagccttgaatgtctgggctcaaatgattctcccacatcagcctcctgagtagctggaactatcggcgcatgccgtgacacccagctaatttttattttttgtagagatgggatctctctcaaattcctggcctcaagtaatcctcttgcctcagcctaccaaaatgctgggccttattattgtaatgttttttcctttcatttaagtaaaaattaaagtgtaatttactggccaggtgtggtggcacaggcctatagtcccagcactttgggaggctgaggcgggcggatcgcttgagctcaggcattggagatcagtctgggcaacacagtgagaccttgtctctacaaaaaacaaaacagaaaattagctgggcatagtggtgtgcattcgtagttccagctaattgggaggctaaggtgggaggatcacttgaatccgggaagtcgaggctgcatcaagccaagatggccccactgcactttagccaagaccctatcacaaacaaacaaacaaacaaacaaacaaacaaacaaacaaaaaaacaaaaaaaccagtgtaatttactgacagtgaaacccatacatattagtatacgattctgtgatatttgacaaaccacacaaccctataaccacaacctcaatagaaatacagaataccggccaggcctggtggctcacacttgtaatcctagcactttgggaggctgaggcgggtggatcacttgaggtcaggagttcaagaccagcctggccaacatagtgactctctgtctctactaaaaatacaaaaattagccgggcatggtggtgggcacctgtaatcccagctactcaggaggctgaggcaggagaatcgcttgaacctgggaggcggaggttgcagtgagccgagatcataccactgcacctcagcctgggcaacagagcaagactccatctcaaaaaaaaaaaaattaaaaaaaaaaaaaaagaaatacagaatacctttttccctcccaattcctgcaattcctgcgtgcccctctggagtcaatttctctccctcagtcccagcccctggcccctgctgacttcctctctgttgctatatttctgccttttcccaggatattatgtcaatggaatcgtaccataggcagcttttggcgcatacttcttccaggcagcagaatgcatttgaggcttattcacgttgttgggtgtagcattttttgtttcttttactgttgaggagtccctggtatggatgtgtcaccatgcatccattcatttgttgacagacacgtgagttgtttccagttttggtgacgaatgcccaaattcataggcgatgataaataatgtgccagacgttgatgtgcaagttttggtgtgagggtaagtttccatttctctacggtgaatacctatgagtccttattctctctctctgtctctgactttctctttctctctttatttatttgtttatttatttttatttattagacagggtcttgctctgtcacccaaactggagtgcaatggtgcagtcttggctcattgccacctctgcctcctgggctcaagctattttcctgtctcagcctccagagtagctggaattacaggtgcgcaccaccacacccagctgatttttgtatttttagtagagagggggtttcaccgtattgcccaggctggtgttgaactcctggcctcaagtgttctacccggctcatcctcccaaagtactggtattacaggcatgagccaccacacccagccaaaaccagccttttaaaaaaattttattttcggctgggcgcggtggctcatgcctgtaatctcagcactttgggaggccgaggcgggtgaatcacggggtcaggagttcgagaccagcctgaccaacatggtgaaaccccgtctctactaaaaatacaaaaattaactgggcatggtggcacacgcctgtagtcccagctacttgggaggctgaggcaggagaaatgcttgaacctgggaggcggaggttgcagtgagccgagattgcgccattgcactccagcctgggcaacacagcgagactccatctttttttttttttttttgaaacagagtcttgctctgtcgcccaggctggagttcaatggcgccatctcggctcaccgcaacctctgcctcctgggttcaagcaattctcctcccttagcctcctgagtagctaggattacaggcatgcaccatcatgcccagctatgtttttttttttaatttttatttttagtagagacggggtttcaccatgttggtgaggctggccttgaactcccgacctcaggtgatcagcttgccttggcctcccaaagtgctgggattacaggcgtgagccaccatgcttggctaatttttgtatttttaatagaggtgaggtttcacccttttgcccaggctggcctcgaactcctgaccacaagtgatccgcccaccttggcctcccaaagttttgggattacaggcattagccattgcgcctggcctatatggaggcttttgtatggagagacaggacactggtcccctggatactggagggggacagtcagggatagagctggggccaaggggaagatatagaagtgcgaatcaggtgaggtataggacagggtgcctggaggggaggccagaatcttcattctaaccaaatccttgcctagtttttaaaaaaatgggcaaggctgaatgtggtggctcatacctgtagtcccagtactttaagaggccaaggcagaaggatcacttgagcccaggagttcgaggctgcagtgagctaggactgtgcactccagccgggtgtgatgacgcacacatataatctcagctctcagaaggctgaagcaggagagtcacttgaatccaggaggcagagattgtagtgagctgagatcacaccactgcactccagcctgggcaatagaaaaaaaaccaaaaccaaaccaaaacaaaaccttaaacacaaagttaccatagaactcagcaactcctgaggtcaggagttcgagaccagcctgaccaacatggtgaagccccttctctactaaaaatacaaaaattagcagggaatggcggtgcatacttgtagtcccagctacttgggaggctgaggcaggagaatagcttgaactggggaggtggaggttgcagtgacccgagattgcaccactgctctccagcctaggcgacagagtgagactccatctcaaaaaaaaaaaaggccgagtgcagtggctcacgcctgtaattccagcactttgggaggctgaggcatgtggatcacctgaggtcaggagtttgagaccagcctgaccaacatagtgaaactccatctctactaaaatacaaaaaattagccaggcatggtggcagatgcctgtaatctcagctacttgggaggctgaggcaggagaatcacctgaaccagggaggcggagattgcagtgagctgagattgcgccactgtactacagcctgggcgacaagagcaagactaaagatggtctcaaaaaaaaaaaaaaaaaaaaaagaaaagaacagaaaaagaaaaacaaaaagcctccacatagtccccttgctcttgtagaacagagaaggacttcatagacctttccccaacacaggttagtgccagcatgaccttgccaggccaccttaatagagcaaagatcagtagatgctatgggaagtcaaattttctcaacattagaaactctttccaacacacagaaaaatggaaagaattgggcacaggcacactcacccctagattctacaacgaactcattgccattccgcggtaaacgctaagccaggcgtcacacgctatgctgtgtgatgctagaagtgcgcacacttatcctgttggtggtggaatttacacgtgcgttcatgagtgtgcacgtgcgttagccgctgtgtgcatttgtgggcgtgcaaagggatgtgcctgggggaaaacctcacacagtggttaggaagcctgtgcagttgaactgtgggggctcccgtcttgcttctgccacttaaggactgtggggccttgggcgaattgcccaacttctctcctgcccgtttcctctttcagtgtggattcattcattcaacaaatatttacggaacgaacacctcctgcgtgccaggctccattccaagcactgggggttgcagcggcgaacaaaacagacccaaatgcctgccctggtgggccaggaaggcagaaataaagatgaagagttggtcaagtctgcagtatgtcacagggtggtagggctgcgtttgtgtacatggggaagaggctgcagctttagaggtggggggacctcccggggaaggtgaggagagtgaggtgcttctagggggatggaggggaggggagagtctttctggcagagggcaaagcaagtgcaaaggccctgaagcaggaatttactttgctgtttttttttttttttttgagatggaatctcgctctgttgcccagactggagtgcagtggcacaatcttggatcaccgcaacctctgcctcccgggttcaagggatcctcctgcctcagcctccgagtagctgggattacaggcgcacaccaccatgcccagctaattttttgtatttgtaatagagacaggctttcaccacattggccaggctggtctcaaactcctggcctcaagtgatctgcccgactcggcctcccaaagtggtgggattgcaggtgtcagccactgagcccggcctacttggctgtttaaggaacagtgaggaggtccatgtggttggagcagagtgatagaaggggtgagaggaaggagggcaaaggcagagaggtgacagtgggtgttgtggggaaggagagcttgcaagatctcaagagttacaggcatggcaggccaggcatggcggctcacacctgtaaccccagcactttgggaggctgaggcaggaggatcatttgagcctggaagtttgcgaccagcctgggcaacatagcaagacccctgcctctacaaaaacaaaacaaaacaaaacaaaacgcaacaattagccaagtatggtggcatgtgcctgtagtcccagctactcaggaggcaggaagatcgcttgagcccaggagtttgaggctgtagtgagctatgatcgcaccacagcaatacagcctgggtcacagagccagaccatctcttaagaaaattaaaaaaaaaaaaaaaagatttgcagaaagtactcaagcttttaccctgggatgtgttgagggtgtcctctctggctgctgggtggatgataatagcacctacctgaaggagttgttggaaggacgacatgaattaatatgtgtaaagtgataggccagtgtctggcatataccacacatggggtaaggattagtttatttttatatgcggtaggcgtgtgtgtgttgggtgtctctgggcggcagctgagccaggtggccattagtgagtttgttgttgtgaaagaatctctctaacactatttaaaaaaccctgctgggtgtttaaaagccctactggggttgccatgttttggctgggtcccggctcttttgtataacagatgttacccagatgtcagctggggtcaatagagcctcagagatttggcgtctgcctctctcccacgacctgtgggaagcctggtgccctctgtgagatgcttgtgaattcccagggcctctgttctcatggttgcgtcttggcctgagttcctgcccgctgaactcttgccctcacccaccttcctggggccagtgctttgcgggtgaaccggtcctgtgttcttgattttcccccagatcactcttgcacatggactgcctgcaggttgcctctcaagatactgtgctctcccagtctggccaatgtagcaagaacctattgttcctgctgtagttttttttttttttttttttaccattgcttgagcttctgcataagatgttgcttgacaaagcattccaccaccaacaggaaaagtttacacacttgttgcataacacagcatagagcgtgatgaccggcttggagtttaccaggctgtcctgtgaaggggaagttcacttaggacacccggggccaatggctgtgagcagcagaaggtgcctttgatgtcaagctgtcttgaacgctgctgctcccgggtgggtaagagctggcacagtccagaaaaattgaggcggcgacacgatgagagacagcaacccatccccagacaaacctcaagagaccagaagcagccacattgcaccagacttctggaaaattaggcaagcgttggcaacagaatatgttgtggactcttctcacagtttctgtaatcattaactgctttctcagggtgtggatattcaaggaccagaggtcaaagttacagcaacagcaccttgcaaggggcaggggtgaggagaacctccttgggcaggtcgtgctgtatgggataagcccagaactggtttagttctgagacgagggtgcagatagtattggaaagatgcatatcactcaagcctggaagaagaccagggttacacttaaccttgactgcagttcaatgcctcggtaatatggactgaattgtaactaagactgttctctgcaaggtttgcttggtttctgcatctttgtaattgtagcatttggtgttcacttgaaggatgggtcttcaagagcatattctccaatgtttctttctcacggctcaccacaacctcgacctcccaggctcaagtgatcctcacacctcagcctcccgcgtagctgggactactggcatgcaccaccacacctgactaatgtttgttttttttttgtagagatggggtctccttatgttgctcaggctggtcttgaactcccaggctcaagcaatccgctcacctcagcctccaaaagtgctgagatcacaggcgtgagccatcatgcctggcctctccagtgtttcttaaatgtttctggaccacatacttgtttaggaattcacccaaatctaaagaccactgctggcccattgccaaaattcctcccaccccaaatatatttacccaaaagattttgcagatagttgtatggtattgtggtgctgcaaaattttatccacagagcccattccaattctgggttcataacctctgatctagcttggttctcttattttacacatggggaaactgagtcaaaagagcacaaagacttgctcagggttatgaagacacttcatgacagcccttggtgtcagagtaagaactggatgtgagttcccttaccagctgagatgtcttctctctgtgcctcagtttccctatctgcaaagccaggataataatagcacttacttggtagggatgctatgaggatcacatgacacatatgtgaagcatttagaaccaatgccttaataaatgatagctttttttttttttagagagagcttctcactctgttgcccaggctgctggagtgcagtggcacaatcacacctcattgcagcctcaaactcccaggctcaagggatccttccatctcagtttcctaagtagctgggaccacagatgtgcaccatcatgcccagctagtacttttttttacattttatgttttttgtagagacagggtcttgctatgttggccaggctgatcttgaactcttgggctcaagtgatcttcctgccttagcctcccaaagtgctgggattacaagtgtgaagccaccatgcctggcctatggctctaatttttatcaccgttctctttttttttttttttaagtgtagacccgagttgattctttagcctgtagctaagtcaaagtttgaaccaaagaactcctgccacctagtggttctgtgatgaataaagtagggtttgcagcactgaaacatggtgatcacatgcatgtctttgcctgtgtggttattgttggggaattagtggctatgtctctttccaaagagagtgtgtttacacattgtatctgttagcctttgctgtgtaacaaactaccctatggattgcaaccatagccacttattaacccttgattctgtgggttggcaacttggttgagtttagccaggcggttcttctgtcggtcttgcttgggcccatgcatgtggctacagttagctggtgggttggctggggctgactaccttggattgcttcactcatgagtccattagcaggctgtttgctggggtgccttggttctcctccacgtggcctctccggtgggcttgctcaagctcattcccatggtggttgcagagttgctaggaaaagcagagaatatagccctaatgcgcaagaacttccccttgtgtcatgtttggtaatgtctgattggctaaaacaagccatatggtcaaacccagactcaggaagtaaggaaacagaatctatctcttgactggaggaaatgacaaatattgtaaatattggggctgttcttcccactccccaatctgtcacacatgtttgctggcgagtggttgggtgttgaatcgtcagtttcaacttaaaggattttgactcttttttttttttttgagacagggtatctccctgtcacccaggctggagtgcagtggtgtgatcatagtttactgcatcctcaacctcctaggctcaagctctccccccacctcagcctcttgagtagttggacccataggcatgcaccaccacacctggctaatttgaaaattttttgaagaaatggggtctccctctgttgctcaggctggtctcaaactcctgggctcaagtgaagttcctgcatcagcctcccaaagtgctgggatcacaggcgtgagccatcacacccagctaaggattttgactctaaagatatgttttcacatgttttcacttctcaaaagaagagagtttataagtagagaccataacttccaggctagcccaccagtcttatgatggaaaataacttcctctctatgggatgtgatggttaattttatgtgtcaacttgactgggccataagacacccagatatctgggttaaacattatttctgagtgtatctgggagggtgtttctgggagagattagcatttgcattggtggactgagaaaagcagatggtgctccccaatgtgggcagacctcatccaatctgttgagggccagactagaacaaaaaggcagagaggaaggttgaattctgtctgtgtcaaactgtggaatagggacattgatcttctacccctggtgctcctggctctcaggccttcagacctggcttggaatctgcatcattggctctcaggctctccaacctttgaacaataccatgaatcttcctgggtcttcagcttgcagaaagcagatcataggatgtctcagcctccataatcagatgagccctgtaattatataatccttataataaatctcaccctggatctctctatctctttctgttgctgtcgctctctctccacctttctgatcagctattgattttgtttcttgggagaactctgactaattcacaggacatttccatttcttcgtttattgtggggttctctctctcagccatttgcattcccccaacacctccttccctcattatggattgaattgttccaccccaaatgcacgtattgaagccccaaaccccagtgtgactgaatttggagatagggcattgattgattgattgattgattaattgagatggagtcctgctctgttacccaggcaggagtgcagtggtatggtcttggctcactgcagcctccacctcctgggttcagatgactctcatgcctcagcctaccaagtagctgggattacaggcgattgctaccatgcccaactaatttttgtacttttagtagagacagggtttcactatgttggccaggctggtctccaactcctgacctcaagtgatccacatgcctcagtctccgaaattgctgggattacaggcatgagccaccgtagctggtaatagggtcaacttgtacatgtatttcaactcatttccagcggaggtcagtcaagaatctcattctattaaagtcagtctatgctatgactttgaagtctgttgcccaggctgattgcagtggagaccatggctcactgcagcctcaacctcccatactcaagagatccttctgcctcagcctcctgagtagctgggaacacaagtgtatgctaccatgcctggctattaaaagaattttttttttgtagagatgggggtcttaccgtgttgcccaggctggtcttgaactcctgggctcaagcaatccttctgcctcggcctcctaaagtgctgagattacactcttaaaccaccatgtccagccagatgacttttttttttttgactgagttttcgctcttgttgcccaggctggagtgcaatggcatgatctcggcttaccacaacctccgcttccctggttcagaggattctcctgcctcagcctcccagtagctgacattacaggcaaacgcctccattcctggataattttgtatttttagtagagatggggtttcgccatgttggtcaggctggtctcgaactcctgacctcaggtgatcccaccctccccccatcccccacctcagcctcccaaagtgctgggattacaggcataagccaccgcacctgtccagctttccattttcttacttatcaattatctcactgtatgagatacaatttccttaattctgttttattttaagagacagggtcttgtctgtcgcccaggctggagtgcagtggtgcaatcatagctcactgcagcctcaaactcctgggctcaagtgatcctcccacctcagcctcctgagtagctgggacctcatgtttgcaccaccacacctgggtgatttttttttttttttttttaagatatgggggtctagccatgttgcccaggctggtcttcaactcctggccataagctaatcctcctgcctaggcctcccaaagtgctgggattacaggcatgagccacagttcctggctcctacattactttttctgatcatgttgtccccagcctcagctgtgattggctccaaaccccagctcccagccaacacctcatcttttggttacagtgattggctcaggagtgagtgtgtaacacacccagagccaatgagaggcaaggacatttgctggggattctgggaaagtacacctccctttttctttcttgggagcaattgaaagagaccctcgagctggccctagagggtgtgggtaggagaatgggagaaatggcagtgactgctttgtggactactggggaaggattggggcgttagctgcaatgtggagcctgaacataaagcccaggcagccagtgatggcagaggagaggcaccagagccttggtgaggtctggtggatgcctggatcaagcctcacctgaagcagctagcttttcagttatgtgggtccatatttactgtgaaaacgaagatgatattaggttgatgcaaaagtaattgtggtttttgccattaaaagtaactggaaaaccacaattagttttgcaccaacctaaataatatgtgacattgtatagctcctactacatgccagacccttatttttttttctttttttttgggggggatggactcttgctctgttgcccaggctggagtccagtggcgcgatctcggctcactacaacctctgcctcctgggttcaagtgattctcctgcttcagcctcccgagtagctgggattataggtgtgttccaccacacccaactaatttttatacttttagtagagatggggtttcaccatgttggccaggctagtctcgaactcctgacctcaagtgatctgcccacctcggcctcccaaagtgctgggattacaggcgtgaggcactgcgcccagcctaaccacttgccttgtattaatctccattgcacagatgaggaagctggggcgcagagaggttaagcaatttgtccaaggccacacagctggcgtggccagaaccaggattcctggacccctcaccttgtgttcagttctgccacttgcttctgtttttacacccaaaggagttctgactgtttcccagtaatgccagaggctgcataactggagagaggaagtaagagccactcttcctttgcctagaaccgtcagtggctccccgaggcccctgggttaaagaccacaatccccactgtggccggcaagccctgcacaatgcagttccctctatcacttcccgtcctgtctcccactgctgtccccacgtcactcagccctcaccgagctcctctttgtccctccaatttgccaaacacctcaggacctttgtctgtgctgttccctctgtctaaaatgcccttcctctgctgctcctcctaaaccaagagcaaatgcgtatcctcagagaagtgacccctcacagccttcctcctgacccggatctaggctaggaaaacccaggcaggaagaacacaggccctgaggcagctggccccagttcaaatccgactccatgactgccttgctgtgtgaccttgggcggataccttgatcgctctgtgcctcagtttcctcatctgtaaaataggatgttaataggcaggtactcctgccttataagtttgggtgaggatcagaggaggctattatgtggaacgtgattagaacaatgctgaactcagttatgcaggcagctaataacagtagtgtaaaggcaagggttggtgcactattcacaatagcaaagacatggaatcagcccaaatgcccatcaatgatagactggataaagaaaatgtggtacatacacaccgtggaatactatggagccatacaaaggaatgagatcggccaggcgcggtggctcatgcctgtaatcccagcactttgtgaggctgaagtgggtggatcacctgaggtcaggggtttaagactagcctagccaacatggtgaaaccttgtctctactaaaaatacaaaaattagctgggcatggtggcaggcgcctgtaatcccagctacttgggatactgaggcaggagaatcacttgaacccaggaggtggaggttgcagtgagccgagatcgcaccactgcactccagcctgggggacaagaaggacattctgtccccgcacccccccccccaaaaaaagggaacgagatcatgtcctttgcagggatgtggatagagctggaagccatcattctcagcaacctaaaccaggaacagaaaaccaaacgctgcatgttctcacttataagtgggaactgaacaatgagaacacatggacacagggaggggaacaacacacacacacacacacacacgcacacatgcgcgcgcgcgcgcgcgcacacacacacacacacacacacacacacacacacacacacaactggggcctgttgggggagggcagggtgggagagcatcaggaaaaatagggaagccaggtgcggtggctcgtgcctgtaatcccagcactttgggaggccgaggcgggtggatcacgagatcaggagatcaagaccatcctggctaacacggtgaaaccccgtctctactaaaaatacaaaaaaaattagccgggcatggtagcgggtgcctgtagtcccagctacttgggaggctgaggcaggagaatgctgtgaacctgggaggtggagcttgcagtgagccgagattgagccactgtactccaacctgggcatgagcgagactccgtctcaaaaaaaaaaaaaaaaaaaaaaaggaaaaatagggaatgccgggcttaatacctaggcgatgggttgacaggtgcagcaaacccccatgacacacgtttacctatgtcacaaacctgcacgtctcgcacatgtaccctggaacttaaaaaaataaataaataaagggaagggaagaatgggaagctagtgtttaatgggtatgctgttttggttttgcaagatgaagcattctggaggcggatggtggtgatggttgcacaatgtgagtgtgcttaatgcctctgaactgtatggacgctgagaaatgattaaaatggttagttttacattatgtatatattactacacaaaaaaggcagatgtggctgggcatggtggctcatgcctgtaatcccagatctttgggaggccgaggctggcagatcacttgaggtcaggagttcaagaccagcctggccaacatggtgaaaccccatctctgttaaaaatacaaacaaaacaaaacaaacaaacaaacaaaaaacccaaaactagccaggcgtggtggtgcatgcctgtaatcccagctacttgggaggctgagggcaggagaatggcttgaacctgggaggtggagatttgcagtgagtcaagaccatgccattgcactccagcctgggcaacaaagtgagactctgcttaaaaaaaaaaaaaaggcagatgtaaaaaaagtaaaattgtgatttcaggaagcccctatcttttctttcaaggcccttatctcaccctataattaagcatatttatgtatttttatttatttagttttgagacatgatcttgctttgtcacccaggctggagtgcagtggcatgatcatggttcactgcagccttagactcctgggctcaagtgatccttccacctcagcctcctgagtggctgggaccacaggcaggcaccaccacacctggctgactttcgtatttttttttggagagatggggtcttgccacgttgcccaggctggtcttgaactcctgggttcaagcaatcctcccaccttggcctcccaaagtgctgggattacaggggtgagtcaccacacctggcaattaagcaatttttttttgagacaaagtctcgctctgttgcccaggctggagtgcagtggtgttatcttggctcactgaaacctctacctcccgagttcaagcgattcttctacctcagcctcctgagtagctgggattacaggtgcatgccatcacgcctagctaattttttgtatttttgttagaaacgggattttgccatgttggccaggctggtcttgaactcctgacctcaggtgatccacctgccttggcctcccgaagtgctgggattacaggcgtgagctaccgtgcccggcataattaagcattttcaaagcataatttttccatgagcgcctgtcttgccggctctgctgtatgggtcctgttttactgaactttggttttcttggtccagcccagtccctgggcagggtggggaaagcagtttgcctcacattgtctgcagagaattgaaaagcaagaataaaaatcaccagaaggcagtctgcttttatcattcacatatgcccagaattctaaagaatgttagtaataaaataccctgaaaaaaaaaatcttttggccgggcgtggtagctcacgcctgtaatcccagcactttgggaggctgaaatgggcagatcacctgaggtcaggagttcgacaccagcctgcctaacatggtgaaaccccgtctgtactaaaaatacaaaaattagccggtcttggtcgtgggcgcctgtaatcccagccacttgggaggctgaggcaggagaatggcgtgaacccgggaggtggaggctgcagtgagctgagatcatgccactgcactccagcctggccagctgagcaagactccgtctgaaaaaaaaaaaattggttccaaaaaattactgcggttacagctgaggtttttttttttgtggttgtttgttttgataacttttacattttgaaatagtttaagacttacaagaagctgcaaaaatagcacagagctctcatgtcccctgcacccagcttcctctaacaagatcttacatgaccacagtccagtgtcaagatcagcacattgcatgagtgagttagccctacatggatgggtataaagaaattaatagaggctgcgtgcggtggctcacgcctgtaatcccagcactttgggaggccaaggcagggggatctcctgaggtcaggagtttgagaccagcctggtcaacatggcaaaacccgtctctactaaaaatacaaaaattagccgggcgtggtggcacgcgcctgtaatcccagctactggggagtctgaggcaggataattgcttgaacatgggaggcggaggttacagcgagcaaagattgaaccactgcactccagcctgcaagatggagtgagattctgtctcaaaaaaaaaaaaaaaagaagaaagaaatagaaataaaaggaaactcatgctaaaaaaaaagatcaggacattgatgctgatagaatatgactgattctctccagtacagaatttacttggatttctctagttactatttattttcataatttacgtatttatttatttgaggtttcataatgtacatgtaaacttcaacttagcgcattttcatcatttattcttggtgaactttgtgttctccatggaaattaattcagagaaattcccatgtacagaggcagtccacataagcggatttaattatccactttctttttcttaaatttatttttagttattgtggaaccataataggtgtacatatttatggagtatatgtgatattttgataaaaacatacaatgtgtcctgataaaatcagggtaattgtgacgtccattaccccaaacatttatttgtgttaggaacgtttcaattacaattgtttaattatttcaaaatatataataagctttttttttcttagatggaatcttgctctgttgcccaggctggagtgcagtggagtgatctcagctcactgcaacctccgcctcccaggttcaagcgattctcctgcctcagcctcctgagtagctgggattacaggtgcccaccactaggcccagctaatttttgcatttttagtagagacggggcttcaccatgttggccaggctagtctcaaactcctgacctcaagtgatccactcgcttcagcctcccaaagtgctgggattaccggcgtgagccactgcgcccgaccttcaataagttattgttaaccatgggtgccctattgtgctacggaacactaggtattatttcttctatctaacttttttctttctttagagacagggtctcgctctgttgctcaggctggagtgcagtggggagatcacagctcattccagctttaaattcctggactcatgcgatcctcctacctcagtctcctgagtagctgggaccacaggtatgtgccaccatgcctggctaatttttaaacttttaatagagatggggatctcacgatgttttccaggctggtcttgaactcctggcctcaagtgatcctccctctgcggcctcccaaagtgctgggatcacaggtgtgaaccactgtgcccggcctctaactatattttggacccattaaacattccttctccctcttcctcctcactacccttcctggcctctggtagccatccttcaactatctactttcatttggagaaacaatggtttggaatggcttgagtgtctctaaacctcatgatagtataatacatctacgtcttcctggatttagactagaaagaaataataaaagatgatttaaagatgaaaacacagaacttgaatgacttcaattctgtactttgctgtgaccactgggagatttttttttttttttttgaaacggagtcttgctctgtcgccgaggctggagtgcggtggcgcgatctcggctcactgccagctccgcttcccaggttcacgccattctcctgcctcaggctccagagtagctgggactacaggcgcccgccaccacacccggctaatttttttgtacttttagtagagacggggtttcaccgtgttagccaggatggtctcgatctcctgacctagtgatccactcgcctcggcctcccaaagtgctgggattacaggcttgagccaccgctcctggctgggagattttatttgtattgaaaccagcggagcattgcaaaccgttaggtgtagatgtttgcaagtgtaaattttagttcatacatgaactctagtgccgaattcgaatgatatctttaaaatggcaacttacgctttaaaatttgttcattgttttcacgctaaagaatgaggcaagaaaataaaatgttacatcattttacatcagtctttacaccattgatttagtgacttgctggaattgcgctgcttgcagatatttcggttttattaaagttcccttagttattggacaattatttacataaaatacgattatatcagacattaaccaaattttcagtgtctgcatttctttctttctttttttcctttctttcttttctttctttctttccctccctccttctctctctctcttctttctcactttctctttctttctttccttttctttcttttcttactttcttccccctccttccttcctttctttccctccctccttctctctctctcttctctctctctttctctctttctctctctttctttcccttccttccctccttccttccttccttccttccttccttccttccttccttcctttctttctttctttctttctttctttctctctctctctctctctctctctctctctctctctctctctctttctttcttttctctttctcagagttttgctcttgttgcccaggctggagcgcaatggtgcgatcttggctcactgcaaccttcgcctcccaatttaagtgattctcctgcctcagcctcccaagtagctgggattataggcacgcaccaccacacccagctaatttttgcatctttagtagagacagggattcgccatgttggccagtctggcctcgaactcctgatctcagttgatctgcccaccttggcctcccaaattgctgagattacaggcatgagctactgcgcctggcctgcatttatttcatggttattgttttatttcatgattattgctgaagatgagtctattttatagagaggagaaattgaaaaatgatcccagctggtgtcaaatacaccaggaacgctgctcgaaataaatgttcaactgcacgcatgttttttccagcacaattcacaattgcaaagatatggaaccaaccggtgtggccatcaatcaatgagtggataaagaaaacgtggtatatatacatcatggaatattattcagccatgaaaagaatgaaataatgtgtttcgcagcaatttggatggagctagggccattattctaagtgaagtaattctggaatggaaaaccaaataccgtgtgttctcacttataagtgggagctaagctatgaggatgcaaacgcatagaatggcatcatggatttcaggcccttggggtgggaaaggttgggaggcggatgagggataaaaggctacatgttgggtacagtgtacattttcaggtgacgggtgctctaaaatctcagacttcaccgctaaacaattcatccatgtaatcaacaccaggccaggcgtggtggcttacacttgtaatcccagcattttgggaggccaaggcaggtggatcacctgaggtcaggagtttgagaaccagcctggccagcatggtgaaaccctgtctgtactaaaaacacaaaaaaattagctgagcatggtggcaggtgcctgtagtcccagctaatccggaggctgaggcaggagaatcacttgaacctaggtggtggaggttgcagtgagctgaggtcgtctcattgcactccagcctgggcaacaagagtgaaattctgtctcaaaacaaacaaacaaaaacaaacaaacaaacaaaccaaaaaaccaaaaaccaaaaacaaaaaccacttttaccccaaaagctactgaaaaaaaaaaaaattatggctggcagtggtggcttatgcctgtaatcccagcactttgggaagccaaggcgggaggattgtttgagcccaggagttcgagaccagcctgggcaacatggcgaggtcccatctctacaaaccagaaaattagccaggcacggtggcacacatctgtaatcccagctactagggaggctgaggtgggaagatcacttgagcccaggaggtcgaggctgcagtgagctgtgttggcgccactgaactccagcctgggtgacagagaaagcgagccttgcctcaaaaaatatttattaaaaaatagaataaaaaagaaaaattaaaagaaaaagaaaaagaaataaatatctgttgaatcaaccaatgaaggagggtgcagttccatacagcgcccaccaggtgccgctgctcccaagcctaggccggctcagcgactctgcagggtgaatctcaaccccagccccgcctcggggtcgcacctcaggacgtctccttttccaatctgcagcgtggctcggcctcctccctcatcgcaaggctcccactctgcccctggagtccagtcaaccccgcagccacttgcagaaattttcctataagcagttctgaccacattcctccacttcctgttgggttcctgggacaggttcctgccgactcttacctctgggcctttgctgctccttctgcctgggatgccctttcattagaaaactcatatagtacttagctccacttcttcctgggggcataccacttaattgctccatgcctcagtttcccctgatgcagaggctggacagagaggctttgtccaagaaaagttcagggccaggaattagacaatctgaaaggcaatggggagccatagagggtgtttgagcaggagagtgtcctcagatgtaaggaaggacagagcctccttccctttgcccctggatctttctagaagggccttacggggttggaatgggagactttagctgtggccagctcagactccacttactgggctcccaggggctggacaagcaggtcttcctccccctgtaccctcctggtggggctgtttactctccagtgatgtccctgagtctgggccatcccacagcacctgctccctgggcagacaccaggtgcggggacacccctggagggaaagccacaagcttcaggctgggggcccgggtgtcacctttacggaagcgccggtgactacctccaccgcgggaggttccacaaggctgatgaggctcacgtgggactcaccggggagacagcgtccagagcaggtgaggacggcatgctgggctggcccgttcagggggctggaggacattcagggaccccacacccagctgctgccccctgcctgtctcaggccctctctctgactctgtctccccatctctgtcccctccaccctctcaactctgtcctttctctctggcgctgtctctctctgggtcttgttcactgtcttggagctctccatgctgtgtctctttctctctctgtgtctccccatgtctctctcgctgtctctggccctctctctccctgggtctctggttcagggggggtctctgtctccgtttgagtctctgtctctctctgtgtctctgcctgtccctgtctctgctgccccatccaagccctgctctcagggtggggagaacaggttctaccctctccgaggttctcttcctcattggcttactctgacccggtccctaagggggaccaccaggcactgcccaggaaggaggagggagcaccaggctgcagaaccccatgctgcctccatctgagaaggccctccatagccacgttctccctacagcccaccttgtgcacaaagccagtgttctccctgcagcccaccttctcccagaaaccctcctgccttctccacgcagcccatcttctctctgaagcccaccttctccccacagcccacctcctcccgcagcgcacctcctccctgaagcccccttcttcctgaagcccacctcttccctgaagcccaccttctccctgaagcccaccttctcccgcagcccaccttctctctgaaacccacctctttccgcagcccaccttctcctcgaagcccaccttctctctgaagcccaccttctcccgcagcccaccttctcccgcagcccaccttctcctgcagcccaccttctctctgaagctccccttctccccgcttgttttcccacctggctccaacctcctgtcctgcctttttacttctacgggtgcagcccccgtacctggccctgctccccacacagcacagctgccgccgcccaatgtttccctgctgcgcccaggcctgtgctaggtgaatggaagagcatggcctccttgcacttctgcaaagcagctaatcctgggcccctatgggtggcaacacctgtgtgtgtgtagcagggaactgaaggggggtctggaggtctccaaagatgatgcctcatgcaccagggagggtctggctgttgtgtggctgtaggggtccttattcttgggacctgctccaggggaggtgggggagtccagcttggctctgtaaatctggtggttaggtgggtccagtcaccgtgctgaaggtctttgtcctgggggttgtctgtggttggcgtttgactattgaggggatccagttgttgtaaggatttggggtgcagtattctgggggctctgctgttgaaaggagtcttgttcctgtgcctgtctggggtggttttgtggaggggggcggttttcgctccggtgggaggtccaaatctgtggagattggcgattgctttttttttttgagacggagtctcactctgtcaccaggctggagtacagtggtatgatctcggctcggctcagcctcctgagtagctggggttacaggcacgcgccaccacacccagctaattttttttttgtagagaggggggtttcatcatgttggccaggatggtctcgatctcctgacctcgtgatccacccgtctcggcctcccaaagtgctgggattacaggcgtcagccaccgcgcctggcctggcgattgcttttgtctgcagggggtcgttggggactctggctgctgcagggtcctgttgctttaagattgatggttgcggggacgtgactgctgtgagtgacagttgctaaggggttgggagtatttgttgcaggcaagttagggacacagacctccagctgttgtctgctggagtctgatcgctgtgtgtgggattgtagttagtgggtgagtgacagtcctctctcactgtaaatctctctccgtctctacctctttctctgtccctccacaccgtgctttcattcaaagatttgttgaggaatcattggaataattacggtgaggccagtgtctgactgcagcaggtttctggggggctctcagccctgctcagacggggagaggaggcaggacacccctcattttccccaccacctgtgatcagccctgggggtgggaatcactggctcacatgggccaaaagagctagatgtttgggtctcagagaccacaccccattctgaccttgttctcaaacttcaaggctgaggctgaggggcttggtgggtttggcaggactggcggtcttgggtgggtgcagggactctccctggcgaggggggaacagagagggttacaggcattgggagagaggaccagccatgcagatatctggcaggagcattccaggcagagggcacagccagcatgtgcaaaggccctgaggcaggacagtgcctggtgtgttgagggaagagcaaggaggcctgcgtgcctgaaacagaatgatcaagaggtagcaggatgatttggtgttacaaccaccacttccgagccgggagctcctgggcccaagcctctttggggtgcacatcttcctaacaggctcagctgcgggcacttcccctacagctggggttctccaccatgccctattgatatttggggccaggcagtcttttgtcttggggggctgcgttgtgcattgtaggatattcagcagcgtaaatatttagagaccagtaggggcacctggtctctacccaccaggggccagtagcacttcccaagtgaggataacaaaaaacattgacaactttcccctgggtttagaaccattgtcctaaagttggaagtggggccgagagtgggaggctgcctggggggactggggtgggagctgcacaggacaagtgaggatttctggtgtgaccttaagtgaacaagcttcattctcctcacctatcaaatcagagtctggggtgatgagaggattctattcattcattcattcattcattcattcattcaacaagtatttattaagcatctactatatgccagcccccacagtgaggatataccacgaggaagaaagacaggcagtggcgtcatgaaagaaagagagacgttagttgctgggcgcagtggctcatgcctgtatttccagctgttcaggaggctgaggtgggaggatcgtttgagcccaggaggtcgaggctgcagtgaggtatgattgcaccactgcactccagcctgggtgacagagcaagaccctctctctaaaaaaatttaaaggctggttgccgtggctcatgcctgtaatcccagaactttgggaggccaagctgggtggatcacctgaggtcaggatttcgagaccggcctggccaacatggtaaaaccctgtctctactaaaaatacaaaaaattagccaggtgtagtggtgtgtgcctgtgatcccagctactcgggaggctgaggcaggagaatcacttgcacctgagaaggcggagatggcagtgagccgagatcacaccagggcactccagcctgggtgacagagggagactccatctcaaaaaaaaaaaatttttttttaaaaagaaagagacattaatgaaataattacacagatacctgtaaaatcgcaacaatactaaacgctgagaagcagaagcacctgacttagtctggtaggtcggagagggcttcccagagaatatgtgatcagaggagggggatagaggaattaggggagaggaggaagagcgttgcaggcactggagctgcaggtgccgaggccctgcggtgactccgaatggtgggaaggccagtgtggctggagtagggtcaggatacgctccatctggatctcccaggccctgtgagtgggggaagagagtgcagtcttgatccgttaaaggttttaagcaggaaagtagcataatctgatatgcatggtaaaaagatccctccagcagatagtgtctgtgaagtgcttagcataggcagtgtaagggactcagaaatgagttggatgatgccaacgggtattttggggacccagaggtgtcacaggctccaattcgtgccctctgagtccccacggatgaagctctggcctgtttccaggagcccatggtatattctaggcttggggtgagggggtggaaaagaagaatttccctgttttgagcatagtttcggagatgggggaaggacggccacctctagggtggtggggggagggctccaagggccggaagacacttctttcagtgaactcctgggcccgtttcacagaagggagactgaggccctggggcctcatgagcacccagtcctgagctacaacaccggccactgccctgtgggaggtcccagaggagctgtgtcttggcatcaaaggcgcttttgggacctgctcacagttcaggccacatctcaggcttggcagggtaggccctgggctccggctgcccaggcaccaaacccacctgtgactagctgtgtgaccctaggcaagtcggtgcatctctctgggcctccgggggaaaaagagatgtggagtctcccaagggtgttgtgagaattaaacaacattgtttacattccttcattcaacaaacagttattaagcacctactgtgtgtcaggtgctgttttgggcactgtagacacagagggggaatggtccctgttctcgggggctggtgttctagcggcagagacatacaccaagcaaatacgaccatcggtaatgataaagtaaggaagttcatccacgttgtctcaaatggcaggattttccttgcttttcaaggctaagtagtattgaattgtgtatacatatcacatttccttccttccttctttccttctctccttccttccttcctcccctccctccctccttccttccttccttccctccttccttctctccttccctcttccctccctcccttacttttttttttttttaagatggagttttgctcttgttgcccaggttggagttcgatggtgcagtctcggctcactgcaagctccacctcccaggttcaagcgattctcctgcctcagcctcctgagtagctgggattacaggtgcccaccaccatgcctggttaatttttttgtatttttagtagagacagggtttcatcatgttggccaggctggtcttaaactcctgacctcagggtacctgcccgcctcagcctcccaaagtgctgggattacaggtgtgagccaccatacctgccctccttccttcctccctccctccctcctttcttgctttctttccctcccttttccttccttcctttcccttccctttctttcctccctccctctccctcccttccgtccccctccctcccttccttccccctccctcccttccttccccctccctcccttcctccttccttccttccttccttccctcccttccttcttcctttttcccttcccttttctctctctctctctttttttctttcctcctttctttttctctgtcacccaggctgcagtgcagtgatgcaatcatagctcactgcagcctcgacctcctgggttcaagcaatcctcccacctcagcctcccaagtagttggaactacaggcatgcaccaccacgcctggctagttttttgtattttttgtagagatgggtttcgcccaggcttataccatattttctttatcacttcatccatccgtggtcacttaaattgcttccatatctgtgctattgtgaatagtgcctggagtgccagtacctcttcatactgatttcaataagtgtatgagctgatgggtttgttaacgagcctggtttaatcattccacacagtacacatacatcaaagcctcacatcatactccacaaatatctgcaattattatttgtcaattaaaaataagaaaccagggcacagtggctcatgcctgtaatcccaacactttgggagtccgaggagggtggatcatttgaggtcaggagttcgagaccagcctggccaacatcgtgaaaccttgtttctactaaaaatacaaaaattagccaggcatggtggcgtgcgtctgtaatcccagctacccgggaggctgaggcaggagaatcgcttgaacccagaggttgcagcaagcagagatcgcgccactgtaatccagcctgggcgacagagtgagattctgtctcaaaacacaaacaaacaaaagatacagtaaaataggccaggcgaggtggttcacacctgtaatcccagtgctttgggaaactgaggaaggagggtccactgaggctaggaattggagagcagcctgggcaacgtagcaagacccagtctctacaaaataaaaataaaaaaaactggccaggtgtggtggcacatgcctgtagtcccggctacttggaaggctgagacaggaggattgcttgaacacaggagggtgaggctgcagtgagccatgattgcaccacaacactcaggcctgggtgacagagcaagactctgtcttaaaaaaaaaaaaaaaggtgaaaaagtaaaggaggggagcaaaagtgtctggaataagcagaataaggagagaaagtgagtgtgtaagtgtgtaagtatgtgagtgtgtgtgaatgtgtgggtggctgtttaggctgggggtcaggggaggcttgctgaggaggtgacattggaggagaaagacctaaaggaggtgagggaggagcgatgtgagtgtctggggaacagcattcctggcagagggaacagcctgtgcaaagaccctgaggcaggactgcattggggtgttggaggaacacggaggaggcccatgcggctggagtggagtgagtgagtgagtgtgggaggggatgttgcagttgtccagttacgtgaggagaagagtccaagagaggtggcaggtggaaggatcttagatgaagttttccttttcttcctttttttttttttttgagatggagtctttctctgttgccagtctggtgtgcagtgacacgatcttggctcactgcaacctccgcctcctgggttcaagcagttatcctgcctcagcctcctgagtagctgggattacaggcacccgccaccatgcccagctaatttttgcatttttagtagacatggggtttcactgtgttggccaggttggtcttcaactcctgacctcttgatccgtctgcctcccaaaatgctgggattacatgcatgagccaccgtgcctggcctaaatttttctttttctttttccttttttttttttaagagacagcgtctcactttgttgccagggctggtgtgcagtggtgagattatagcagactgcaaccttgacctcctgggctcaagcgatcctcacgcctcagcctcctaagtagctgggactacaggcatgtgtcaccatgcctgggttttgttttgttttgttttttgcttttttaagagatggggtcttgctatgttgctcaggctggttttgaactcctggccctaagtgatcctctagtcttggcctcccaaggtgctgggattacaggcatgatccactgtgcctggcctctatggcaatttttgaaggtgaagccagtagtttcctgagttgggctcagatttgggggtgagagaaaaagaggagcagaggacaaaagtaggggttttggcctgagcacttgcagggctggtggcagtgggggatggaactgccatgaactgaggtggggaaggtggagggggagctggtggtggggaggggtggaactgccatgaactgagatggggaaggtggaggggacgctggtggtggggaggggtggaactgccatgaactgagatggggaaggtggagggggcgctggtggtgaggcacatcacttgctgggttttggccacgttgagtatttgatgctcgcgggcgttgggaggtaaatgtcccacgaatgctgagtttggggtgaagccagctgggagtcacaatctcctgggctcagcgtagaattaacaaggtgtggtgtgtgtgtgtgtttgtgtgtgtgtgtgtgtgtgtgtgtgtgtgtgtgtgtgtgtgtgtgtgtatgtatgtgtgtttgttgtgggggggacttggtggcctgagtggggtccagccacctgctctgggggatgtagggactcaggtgcctcgaagagagaccctcctggctggcgttttagtgggagctggggcttggccttggatggacacgaggtgcctctgagcttccttcctttgaggctgtgtggtgactgaggccagtgccctgcagagagggaaaggcagaacctgaggggcccgttgggccagagactgtgggctccaagaccgagatgaattttgctgggagtgagtttaaggaagtgaatttccactgcacggcatccatgcataacagccctgacgtcacatcagaccccgtgagccctggtgagcctcccttggagctcgggtgtccaagaactgagtatctgttatgttggtgaacaatgtatgtaccgggttacctgttcagcctttgctgcaaacctgtgcccatttcacagttcaaagaactgaggctcaggaaagaggagtcacttgtccaagtgtgtctttggcagagcagggactgggtccttggcctcaccggctctggacacccctgcccaccccccacttcctgcccatcagcctgttcctggcactcgggaccccagatgggcttgtgggctgggcacgggagataccaacggcttccggtctcttcccctgaggctcaggaggtgccgggggagggggagggcgggccacggctcccagggtgccttgcattttccccttgaagactgagttcccacagaagcgtctcggttttagagatcggtttcgctgggggcttttatgaggcaggggctccatcagattgagagtgcagggccccgaggttccattgggttccctgaaccccgtggaaatgtggcccttccgagaaacctgggctgggctgcccagggccgtgggaatagcctctatgggtccctggttctccttgggcagacttttgagtcagaggaaagccagcttggggaggaaagcaatttcctcatctcaggccccccaagtctgggcaggaggggtggagaaggcagagagctggacctagagaagtagtctccaactccctgcttgcacaccccctgtgacgggcagctcattacctatcaaggcaaccttgcttggttagtgagctggaattcttacaaaatcctttcagatgctggttcaaaactgcaccttcatccctctctctgtggtccttacctagctttctggaccacacggagcacacccccttctccaaatatctcacactcttatatttattcgactgtctattcaggagatgtgtggacacaggggcagacccagagagattgctgcagcaatggtggaatcccactgggtcctgggaacctagaaggcgcttctggcctatctgagaggaatcaatttggtgggcttcctgtaggaggtagcatctaagctgtgtcttaaaggacaaatatgatttggcttagggaagaggtgagggaagaatgcttcaggcagaagaaacattatgtggaggtgagggaccattctttcatgaagtaaaaaatggtctacgtggctggagtggtgtgtttgaggagggctaagggggtactaaggccagaaaagggatagagaaaagcctggagcagtgacccaggtagcagaaaaacaataccctcattcttcaaacagggtatgagtccaaatttgttttgtatttcttaaacatttttttaagagagatggggtcttgctatgttgcccaggctggtctccagctcctggcttcaagtgatcctctcacctcagcctcccaaagtgctggaattacaggcatgagccttcatgcctgactcatttcacatttctcaattgctttgccaggaagcaaggtataccttctaggtacacaagtgcccatcttactgcatccttgctagcattaggttttattgtttttaagaaatctttgccaatttcggcaggaaaaattggtatctcatgtaaatgaaaacaaatgagtatttcccttgtaagcgacatgcctaaacaatttctccagacatgcattggcctggcaaatgctaccttttgcctgagtgttaagaaatcttacactcgctggagagtttgcagtcatttttagctcctctcttagagcaaaagaaaagcttgtgggctaccctctggccacatgggtggaggaatttgtgaggcagcctcctcccttctcctttgattcatctttctttttctcacctttttttttttgtccttttaaacttctctgtactctgttggcctctgagtcttctggtaactgtagcttcatcttcatctggggtgtctttgggctcaaaaaagagggttggcaaaccacaggaagactccccaagtcttcataggagactatgctgatatgctgagtatcttcttcttcttcttatttttgagacagggtgtcactcctatcatccaggtgggagtgcagtggtgccatcacagctcattgcaaccttgacctcctgggctcaagcaacctcctgcttcatttttttttttgatttttttgtagagacaaggtctcactatgttgcccaggctggtcttgaactcctaggctcaagcgatccacctgtctcagcctcccaaagtgtgagatgacaggtgtgcgccaccgtgcccagcctatgccaggtatcttatatcttatagacacatcttaccattttagttctcacaacatctgcctatgatgataaccttgaaccccttttatagatgaggagctgaggcttagagaggttaagtcactcagtcagtatcccatggccaatattggctatttctcttagtttcactcaataaattactcttatgacattaagattttattaaattctaatttaggagcagagggttggccatttatctttctctttctgtcaatctctctctccttttttgagacagaatctcactctgttgcccaggctagagtgcagtggtgtgatcacagctcactacagcctcgacctccccaggctcaggtgatcctcccacttcagcttcccaagtagctgggaccagaggtgcacaccaccatgcccggctaatttttgaaaacttttttttttttttttttgtagagacagggttttgccacattgcccgggttggtctcggactcctaagttcaactgttcctcctgcctcggcctcccaaagtgttggcattacaggtgtgagccacctcgctcggctgttggccatctctctctacccactgtcccaccctgccctgtcaggggatggaagccccattccttattagggagggactgtggagtccagttcagcaccagccttacaatgcaaggaaagaaaagaaaacaggaaagagggaggggaaaccacaaacaacccttagagagccacaagtggctccagggctcagttcctgagttagacctcggttttgggctgctaaattctaagctccaagctctagttccatctctgccactaaaaccccatatgaccttgataaattctttaccagctttgggtctcagtttttccttctacgagtcaacccatctcttggattttctgggaactacagtcatcccttgatatctgggggggattggttctggggtctcccttggatattaaaatccatggatactcaagtttctaatctaacatggtgtagtatttgcatataacctatgcatatcctcccaaatatttatttatttatatttttatttttttgagatggagtctcgctctgttgctcaggctgcagtgcagtggtgcgatctcggctcactgcaacctccgcctctcgggttcaagtgattctcctgcctcagcctcccaagtagctgggattacaggtgtccaccactacccggctaatttttgtatttttagtacagacgaggtttcaccatgttggccagtctggtctcgaactcctgacctcaagtgatcccccaacctcggcctcccaaagtactgggattataggcgtgagccacagtgccctgccctcccatatactttaaatcatctctacattacttatgataactaatacaatataaatgctatgtaaatagttgttatactatatatgtattttttattttatttttatttatttatttattttttgagacagagtcttgctctgtcacccaggctggagtgcagtgacagtggagacttacttcagcctccacctcccaggctcaagtgattctcatgcttcagcctctccagtagccgggattacaggcatgtgccaccgtacccagctaatttttgtatttttagtagagacagggtttcaccatgttggctaggctggtctccagctcctggcctcaagtgatctgcctgccttggcctcccaaagtgctgagattataggcctgagcgactgtgcccggcatatacatatataattttaaatttgcattatttttattgttgtcttgttatttttttcaaatactgtattttcaatctgtggttggttgaatccatggatatggaacccgaggatacagaggaatgatggtatacttttcatatctgagctctaactggttctttttatatctacatgtttttctttcataacctcctgttcttgtttgacagttgtcattccttcctttatctttctgagtcacctaacatattcattgtacagctctttcaagattaaactgatattctctatttcctcagatgtaatatcttctagttggggagtttgtgggaatttcttgaagtggccacagattcattatcttctttaggttatttctccttggtctgggccttctgcacgtgcatgcttttgaccttatatattaggggactctgcacttccatgcgtgggagacttttatccttgtcattgggcatctctgctttggtctctggttcaagttagcattttcccaccatttctcagtgtctgggaggaatggggaggttttggtgtgtatttggtctcgagtggatagtcaatttaccatctgtaaacagatacagttgtgttgggtgatgtccgaaggttctcagagacattttcaacacagatagtacagagtgtggccggagaagtccagtgggagaggattcttttattttttgagacagagtctcactctgtcacccagactggagtgcagtggtgcaatctcggctcactgcaacctccatctccaggctcaagtgattctcctgcctcagtctcccgagtagctgggactacaggcgtgcactaccatgcccggctaatttttgtattttttagtagagacagggtttcgccatgttggccaggctggtctcgaacttcccacttcaggtgatctgcccaccttggcctcccaaagtgctgggattacaagcatgaaccaccaagcctggccaagagaggattctaacaacaataaatgaaaaatagctatgtgggttatttattattatcaggtaccagctcttaacacatcttaccttatttattccttatacaaccaatgaggtaggtactgctattattccccttttgcagatgagacattggaagctcatagaggtgacctgacttgcccaggcacacttagctagggaggaaaatttgaacccagttaaagcaggtgttcttaatcctgcctatttcattgcatcctgacagcatggatactaatctcagccttgccgtattgttaactgtgtggtttcttgacccttttgttcctctgtggaaaccaacctctacccttcagaggtgctatgcaaactcaaaactgtgtcctcactgaaacaagtggaagtatctggggacatttaacctggtgcattaggaagggtttgggtactggatcccattgtacctggattctggctgtgcgacctcaggcaggtcacttgacctctcagagctttgctttcctgatctgtcaaatcaggatgatagccgtgctttactttcctctctgggtagtggtgagtgaaaagtgagatgttccatgtacctggcatacagtaggtgctcaatacacaagaattgttttccctggaggagagcaggctgttgtgggaatagggaaatgtcagtgtcaattcctcaaatccccaaagggttctagggtccagaggaaggggagattctccacggatgttaaggaaagaatgaattctagcagggatgggtccagcaaaggtggcttctagctctactccaggaaaactttttggaccatgagagctcacctaatctgacaggtgactttttttttttttttgaggcagggtctcactctgatgcccaggctggagtgcagtggtacatcacagctcactgcagccttgacttcctgggatcagatgattctcccacttcagcctcctgggtagctgggactacaggtagaaaccaccacacatggctaatttttgtattttttgtagagacatggtttcatcatgttgcccaggctggtcttgaactcctaggctcaagtgatccacctaccttggcctcccaaagtgttgggattatgggtgtgagccattgcacctggccccatattttttagaataaaccattaaacgtatgaatattttgggaatgaaccaataaatgcatgaatagttgaataaattaaagaatgagtgaaatgtgagtgagtgaatgaatgaatgagcagatgaaataatactcaaaaggcaggcgccatgagactggaatacagtctgattggatcctctctttcccaaaggggtggatgccggagaccttccagtgactaggagttcttgctgggttgggtgactatagaatcctgcaaggcttttactgtttgttttctgagctcagtcaagatttccagacatggccaggcgctctggctcatgcctgtaatcccagcactttgggaggctgaggcaggtggatcacctgaggtcagtagtttgagaccagcgtggccaacatggcaaaaccccgtctgtactaaaaatacaaaaattagtcaggcgtggtggcaagcatctgtaatcccagctactcgggaggctgaggcaggagaatggcttgaacctgggaggcggaggttgcagtgagctgagattgcaccactgcactccagcctgggtgacagagtgagactgtctcaaaaaaaaaaaaaaaaaaagatttccagacatgggaacctcttgaacacatgagcaggccacatggtgtggcagaacattctctctagtgactttagaggggatgagctccctgttacagaagaggaccaaacagagctttgatgtcactggtcaaggcagctgcggaggctgcttggctggggtggggctggcctgcgatggggccatctctgagagagacccttttcctgtttcttcatccccctccggccactgcaaggagtgctgcctgtctcgccaccctccgttagcacttcctctgcgaccacaggaaggcccagcccagctcttactgtgttttctttaaataaactcgggcagcagaactatctgctgccccatctccctctgggttcctgtggaggtgtagggggcggtggttaggggggttcaggccaagccacagacgggaaggactcagaccacagtgataacaaattttcctctatctcagtggtgtggcctgagagctgactgctcagagtcactctggcctgtcctttctttatgtgactaccagcccacactcacttctcttccttgggcattgctgattctggtgtggctcttggggacccctgggctgtgttcctcttcctttccagcccagctgtgttcatctcggagcttgcctaccacttctgtcttctctcctagagccaaggtggtactttctagatgctggccccagagctccgggatgtgccgtggacctctacacagatgttcatcaattcctgggctctggtcaacatccgttgaagttggaatggttgttgggaccccctctgatgtccccccaagacagggccaggaatgtggcaggggaattctgtggctagtgggggaccccaagtgagggcttgtctggggtcttgtctggggctcaggtgagctgtctgggcagtggaagacccaggcccagccctttgtggggagagaggacccattcaggctcactgcacctcactgttatgggttctgcccttttgagtattccttcatctgctcattcattcattcatttacccacgcttcactcaattttaatttattcaaatatccatgcatttattagttcattccaaaaagatattcatgcatttgttagttcattcaaaaaatccatgcatttattagttcattctaaaaaatagtcatgcatttattagttcattcaaaaaaatccatgcatttattagttcatgcaaaataatccaggcatttattagtttattcaaaaaaaatccatgcacttattagttcattcaaaaaaaatccatgcacttatttgttcattcaaaaaaaccacacatttattagttcattaaaaaaattcatgtgtttattagttcattccaaaaaatattcatgcatttatgagttaattcaaaataatccatgcatttgttagttcattcaaaaaatccatgcatttattagttcattcaaaaaaaatccatgcacttatttgttcattcaaaatccatacatttattagttcattaaaaaattcatgtgtttattagttcattccaaaaaatattcatgcatttattaattcaaaaaaatccatgcatttattagtttattcaaaaaaaatccatgcatttattagttcatgccaaaaatccatgcatttattagttcattcaaaaatattcaggcattcattcaaaaaatatttatgcattaaatagtttattttaaaaaatattcatatatttattagtttattccaataaatacttttacagggccttcctccttcattcctgatcctggggtggaggtgaattgaggaacatatgaacactggttttaggagtctaagatgcttatactttcataagcacaccccagaggcttttaagcaaaggataaatggaatttcaaaaagctacctctgggctcatggtgggtttgtgggggacaagggtggaggctggtgggggcccaggtgggatagaaaatgcttgggcggggaccagggctgtggggactggagagaggggtggatgcaactgtggaggagcgattagtgggaggtggcatgaatggggccaggggagaaggatttgaggggtgtcagtggcagctttggggccagagttggtggcggtactcacatgctaggagaagaatgctgcttacttttggaatctctgactgtccctgggtcagccacttaacttttcctgagcctcagttgcatggtctgtaagtggggatgatatgctcctgacagagggtatggtagccctaggtgtctataagggctcagtgaacttggacacctgagcaaggttatgttattagcctggctaccaggaacaaagctcagagacagctgcaggaaattgcaaacccagggcgtcccgtctggcacctgtggaccagggttcacctaactgcagctgcttccccagcccatgtgatgtgggcaggtgtggagccgcctaccactacagcaagtggcaacaggtggggaggtggtccagatgtctttcggcttcagagttggtcctggacttgggttctggagtctccccagtgaccaggatttctcagagggggtcccaggtatggacactgcagaccctcctgtgactaggagttcttagaggaggtcctgggcatgggcactggagtccctcccatgaatagaaattctcagaggagttcctgggcatgggcactggagtcccttctgtgactaggtggtcctgggcatgagtgctggagaccttccagtagctaggagttcttgttgacttgggcgactgcagaacaccacaaggcattgattgattgattgattgattgagatggagtcttgctctgtcgcccaggctggagtgcagtggcgcaatcttggctcactgcaacctccgcctcccgggttcaagtgattctcctgtctcagcctcctgaatagctgggactacaggtgcatgccctcatgcctggctaattttttgtatttttagtagagacagggtttcaccgtgttagccaggatggtcttgctgtcctgaccttgtgatccgcctgcctcggcctccaaaagtcctgggattacaggaatgagccaccgcgcttggccttattttttattctccaagcccaaccaagatttccagacatggtggcctcctgagcacatgagcagatcacatggtgtggcggagcagactcacacattagacagatttgagttcaaatcttagtcctgctgctgacttactgtgtgatgtgagcagatgaaagaccttctctagacatattttcttcttttattataatttcactcaacttttccatgagactgggagatttgtgaaggctgggaggcagtttgattttcttcttttgtctaccttacaacctggcacagtgaatgaatgaataaatatgcacctcaaattgttttgtgaagtatagtaagcatttcttgggcaaataaatttgagagcctctaagtcacaaaactaaacttttttttttttttttgcaggatttctcagagccttcaatgtactttgtgattctcctataaggaataaggtatgcaatatttctcaaacatttttgtattctttttctgagggcgcgtcatctttggcactggggttcctaggaacatactttgggaaatgtggacttaggatcattgtcagaggtccttggagtgttgctatttgtctggttgtatattcctttatcctctgtcaaacatgacctgaattatgtcacataaccatgtagcaacagaaactaaggtcaagggctgttagtgaagaataaaagactaaattagaatgttggggaagaaaaacctatactcccaatttaggaaagttactacggtttatcttaaaactcaacactgagtttctgccaaagtgaacagaaaaatgtggtgtctttcatggtttcttgggtgggagttcagcaagggggttaaatgctctccagctgtgaacaaggttgttttcattcatgtgttcattcattaagtcattaattcattcaacaagtgtttatttaccacctgctatttacaagcacaatgttaggtaccagggatacaagagtagaccaaaaaagacatacatatgcccttatggagatgacagtcatcggttttcagaacaaagatgatcggttttcagccctcagtgccccttctttcctgaagtttgttctgaatttttagacaggctccttccgccttgctgtggtttttctctccacctgttttgtatctgaatcacagaaggtgaagacatcccccaggtggttagtagaacccagatctttgtgttagagtcttcatgaaaaccagtgtgagaaactgggctgaggcaagggaggtagtcttccatccttgctatatctctgggacactgggcatcttttctgggctccaccctaggggttgggaatctaataactttgattttttttctctacccccaattaccaaccctctaattcttcaacactaggcacatgggaattgtgttttgttttcaaacctgggcaacaaagtgagaccatgttcctacagaaaatttaaaaatagctgagcataatggcatacaagtgtagtcccagctacttgggaagctgaggcatgatgattgcctgagcccaacagttcaaggctgcagtgaactatgatcccatcaatgcactccagcttgggtgacagtcagaccatgcctctaaaaaaattgcttttttgttggttggatgaatggatggacccatggatgaatatatagatgaatgaatggatttgtagaagagtgactgacacataggagggacatttggatgaatgaaagaatggaggaatagatggtggatggttgagatcagcaaatgaatatatggatgaaaagatgcctagtaaaggcacaatgtgatttaaaaaaaatgaatctctcagtgaatcaatggacggttggatgaatggatgagtgagtaagtggtagatgtgatggagagttgcacaatgaaatggggagatgggtttgagtgaatggatggtgagtgagtgaatgaatggataaatggatagatggtgagttgggtagagggatggacaaatggacagttgagtgaatgggtgagtgattggattacccgatgaatgggtgggtagttggatggatggaagggcaggtaaaaaattctggccacaaactgaagcgatcttggggtacaatctgggcacagtttaggtgaatagcagcttattttctgatcccaaattggctctgtttacctccatggatacatattctctatttctaggttcagtcatccttctgtctccctctgggtttccaagaatcttaccttggaactccaattgaactgagccctgggcttgtctgctgaccttctcaacagtaaggagaacacccctggaagagcatgtgtccttctgagggtacagggttgaaccagctcttcatgatgacggtggtctgctcttaagcctttctagcagtttcttgttttgtggcctcacccaatcttcactgggcatcaaacagatgaagatcgaaccttggtctccagctcagttccaactccacctgtcccctccatgggtgatggtggagacaaaggataaattagagaaaggggtcatccaggtccaccctttgccattactccaagaactctttcctttttcccaggttctccaagcagctatggatgtgggtttctcgggcctgccagatgtgtctcagagtcatagcaagaccttgtggggggctcggggcaggggcccctccatacgtcgccagcgggagttcatgccagaagaaaagaaggacacagtttactgggagaagcggaggaagaacaatgaagcagccaagagatccagggaaaagcgacgtctcaatgatgcagccattgagggcaggctggctgcactgatggaggagaatgccctgctcaagggtgagctgaaggcgctcaagcttcgctttggcctcctgcccctgactggtgggccccgggccttgcccctgcaggctctgctattggaagccccctggactggggacccccggcctggggctgaagcactctcatccttgtctggctctcacagctgcctcttaaggccacgttccctggatgctgggattccaggatgtcggggctgcctgctggctcccagatggactggcttggccacttctcctaggtccccccaagagtctgcatctcctaccctcaacagaattgacatggccttgcagactgccctcccacctgccctcttcagctgtcacctcttggaggggcatgtagggtccagaccagagctcagaccctgctgggggctgtggtcaccagtgccctctggatgccgggcttcagggccatcagatgtgttgctgacacccactgctgatcccatgggtctgtctcctggggtgacctgccctgccccagggaacagtcctgagggtctgggtcagccctctctgccccacaaactgcgcatcaagtcccgagcctcaggcagggtacctcgtggctgggagggtggtcaggcgcccctctgagggcttcctctgggaagggctaggcttgcaagggggtgtttgggggcggaatataggtttgtctgagggatgagtagcttggtcttgatcagcaatctgggaaggcctgtaggaagtaggggtgccctggcttggaaggtccacttcacagcttccataccagacctcctaggggtggagtggatgggagcccatcttggattctaccatggctcttgccttgccttaaaatctatgctttgggttgtcacttttccctcttccttcctcctttccatttatctattcttccctatagccatccattcatccattcatcctcatttattcatccattcattcattcatcaatccttatccatccatccattagtccctccatccttatccatctatccatccatccatccatccatccacccatctattcatccatccatcaatccatccatccattccatccatccatccatccatccatccatccatccctccatccattcatccacttgtccgtccatccatccatccatccatccatccatccatccatccgtccatctatccatccatccattcatccatccgtccatccattcagccatccatctgtccatttatccatcctccatttatccatgcatctattctcattcatccatgcatttgttcttccttctttctatctagccatccattctcattcatccatgcatttgtttttccttctatctatccatccatccattcattcatccacccatccacctatctatgcatgcatccatccatcctcatccactcatccacccatcctcacctatccatccatccacccattctttcttgcttctatccattttcccatccacacacctatccattcatccattcatacatcaatttattctccatccatccatccatcctcatccattcccattcatccatccatcctgtcttccttccttgcatccactcatcctcatccatttacccatccatccatccatcctcacccatccatctacacatccttcctttcatccacccattcatctactcatccacccatccatcctttcattcatttattcatttagccactcatttatgtgctaacttgtttattcattcattctcttactcattaatttacttataattcacttgtcccctcacccacccactcacgatctttagaccttccttttgtgcccagttagtgacaagtgagaagacacttttctggtcttgggtttcctgtcctggggtaggaatgggtgtttgggaagaaacatactgaagaccagactgaaggaggaggtaacgtctagggtgtctgaatcccccttcttggtgtcccctggggggcttgcttaccacccagtttgaggggcagacatattggcttcttctgtgtcttggatcaggccttgagctgctggaacaggagcagctgtgtgagggcatcagtgtcctctctctccctggctgccccctgcccctgagaaccaggtatacacccacccaggtggaagggtccattctgcagggaaggtcttccaggggcctggagcccaaggacttatcaaggctccctcctcctcagtttctcactcagcccctctcccattattattattattattattattattattattattacatcagggatcttgttagattctagataaaaatactcaaactccaatcatggggagagctcatgggatggggggctcatctggactggtactgacactgagaaccagatgcccctggccaactggatcacttggactcaggagcatcgcccacccccaccagatctgggggctgggctagttcttggctactccaagtttatcagagccacaaatgtgtgcagggtgaggacgtacaaagtgcctctctctcactagtacaacaggtgggcagtatcaccaaacaggccaagagctcccctgtgactgggcatccctagaatcctgcacatcacaggtaggacctcctctacttgctcagcctttggttctggtccagggcagggattgggcaagatcagcccttctccttccctccatgcctgaccttccagcaggtggcttttctcatgtcactgagcctcccttatacatctataaatgtttacctataaatgagcccattccctagaaatatattgtgaatattaaataagaggcagtaaataaattgcccggtataggggcttctctggactgttttatcttcataaataatgtgaatcctggagggcaaggtggctcatgcctgtaatcctagcactttgggaggccaaggcagatggatctcacttgaggtcaggagttcgagaccagcctggccaacatgatgaagccccgtctctagtaaaaatacaaaaattagccgggcatggtagcgagcgcctgtaatctcagctacttgggaggctgaggcatgaaaatcacttgaacccaggaggtggaggctgcagcgagctgagattgcaccactgcagtccagcctgggcgacagagcgagactccatctgaaaaaaaaaaaaaaaaaaaggaaaaagaaaaaatcctgtttccctttttgctttgcccaccaaggagctcagggccgagcttgtggctcagctataacagcattttcattcattcattcattcattcattcattttttaattcatttgcttatttagcaaattttcttgatcataagtttctcattgtttcattttattcaaggcatgttttgttgtaaaaagtctgaaaatcatatgcagccgagttggcagtcttttcttttgtggtttgtacatttttgtcatgtttaagacaacttccatgtctcaagatcataaagatagtctcctatctttatgttccaggtactggggaaagagaagtgaacacaatagatgtgattcctgcctctatggtactgataacccagggaaggagatagattaaaaaataagaaaaacatatagtaggatcaatgatgatacgtgtcatggagaaaaaagggaggcttgggaaaggtaggtgtgggtgcgttgtaataattgaaatagggagatcaggattgaaatagggggatctcagccttgctgagaaagtgacatttgaacagagacttgagagagatgaaggggggagtcatgcatgtatcagaggaagaacatttcctagtcagaaagaacagcctgtgcaaaggccctgaggtgggatagtgcctagtgttttgaggaagattgaggaggcccatgtggctggagtggagtgagtaagggggagagagggaggaggcgagggcagggaggtgatggaagcaggttgtggaggactttgtgggccaaggtgaggactttggcttcctttctgagtgatatgggcatgagggggacgtttccaagtatatttctgttgtagttctccccttacctccatcctgtgatgtgtgaggctgagtgaaaataaacccaccacataagtgcaggagagctggctcattgtctggggtggggataggtggggactgaccacagtgttgctgtgactcatgtccccctaaatggccacattctccctgcgctcagagccagggtgctcatcccatccctgcttctaaacttctctgagatatgacggacagggcaggtaaagctactccatgaggtggaatcatggaagaaaaacacagatggttcttttttttctttatgaagctgtcttccactaaataattatttttgacaagtgtgggagaaagggtaatcagatgcatgtgggggatgctggaagggcaaagggatggctgaggtgggagatgagtcagtgaggaagtggccaggaatagttctcaaggcattgcatggtaggtaaacaggaaggtaaacagctcaggcaaacaggaagagctggagataagttggagataaactggttactctggggaggaaggccatggaggggaaaggaagtaaaggcttcaacttgccctgcaaataccatgactcctgagggtctgtcacctatgacaagcagactcatttcttggctgcctagtctgggccagtggttgtgctggtgatttatcctagattttgtttgaccctctgaaaaagccttcattattatgatctccattaacagatggggaaactgtgactcagagcagttatgtatcttgcctaatattacttagttggtgactgggccacttcccgcctcatcactgcaccagtgtcattggctaactttctattccttgagattctttcctgcctcaggtctttgcatttgctttccctctgcctggaatttccctgagtctttaaatgactcttttttccatcttcaggtctcggttccaatgccacctcctcagaaaggccctccctgtacatccagtctaaataagagccccagttatttgtgttgagcatgtacccatagtaggtgttcaataaatacttgttgaacaaatcaatgaagtgaataggttcagatgagcctcttagtaaaagcttccattgtagctcttacttaattcaagagttagatcctgtgtcaccaggttttatgatctggaggatgaggatggggattcttctgttgcattcacccaaaaagcttttgtatttgggacagagcctgtcatgcaagtgtgtgagaaatattgttgaattgaatctgaggtttgataaggaaacaggagccatgttatggggcagagggagacaaagaaggagggtgtcacgtaagtctttccttcattcattcactcactcatctgtccactcattcactcactcatttattcttgcactcatccactcactcattcacttactcatcattcattgattcactcactaatttattcattcagccactcatccattcacccactcattcattcactcattcatccattcacccactcattcactcacccactaattcaatcccttcctcccttactcattcattcatgcactcatgtattcattcatgcactccagtccctcactcattcatccactcactcacgaattcattcattcatccactcactcactaattcattcatccactcactcacgaattcattcattcatccactcactcactaattcattcattcattcactcactaatttgttcactctctcattcactcactcactcattcacacattcactcactcatccacccatccatccatgcgttcatgcacccatccatccatgcatgcgtgcatgcattcatccatccatccatttatttattcacccacaaccttccagaaacaatgaaatctattccttttggaatagatttcaaagggtggcccttacagaacctgccctttgataagaagatggacaaccttcaggtgaacaaatagacaatcagtactgtgtcagatgctactgagggctgtgagcttatggctggggcattcggggactgggcaggtcagggaaggtccctctgaggaggtgacatttgaaccaagacctagaaaaccttagtaagtgaaagaagccagccacaaaaggacatatgttgtctgacttcatttgtgtgaaatatttgaaacatgattcttagagacaataagcagattggtggttgccaggggctgggggagaggtgggaatgggagtgactgctaatggggatgggatttctttgaggatgatgaaaatgttttggctggaggcactcactgcacaccattgtggcaggcgagaattctaccactgaaccactgatgcctgactgcacaccattgtgaaggcactaaaggccacattggattggacactttaaaatgattaattttatgttatgtaaatttcacctcaattaaaaaaatgctaatgaggccgggtgcggtggctcacgcctataatcccagcactttgagaggctgaggtgggtggatcacttgaggccaggagttcgagaccatcctggctgacgtgatgaaaccctgtctctactaaaaatacaaaaattagctgggcgtggtggtgggtgcctgtaatcccagctacttgggaggctgagacttgagaatcacttgaacccaggaggcggaggttgcagtgagccaagatcgtgccgctgcactccagcctgggtgacagagcaagactatgtttaaaaaaaaaaaaaaaaagctagtgagtctgccatgcccagaggaaggcctgcacctgagatcaaaagggacagagagatcagggaacagggcgcagagtatgaggatatgggaggagaatcaccccttgttggcccccacttggaaatgggggcgtgggagccctgccagccctggctttgtgggtatgccagggtgacagggtgtgaagcgcctggacctgcctgggtagggaagtaactcacatgcacacacactcccgc
